(19) United States
(12) Patent Application Publication
(10) Pub. No.: US 2011/0023193 A1
(43) Pub. Date: Jan. 27, 2011

(54) DROUGHT AND HEAT TOLERANCE IN PLANTS

(76) Inventors: Cory Christensen, Sherwood, OR (US); Wuyi Wang, Newbury Park, CA (US); Dennis Yang, Ballwin, MO (US)

Correspondence Address: FISH & RICHARDSON P.C., P.O. BOX 1022, MINNEAPOLIS, MN, 55440-1022, US

(21) Appl. No.: 12/856,204

(22) Filed: Aug. 13, 2010

Related U.S. Application Data
(63) Continuation of application No. PCT/US2009/034068, filed on Feb. 13, 2009.
(60) Provisional application No. 61/029,048, filed on Feb. 15, 2008.

(51) Int. Cl. A01H 5/00; C12N 5/10

(52) U.S. Cl. 800/306; 435/419; 800/295; 800/320.1; 800/320; 800/320.2; 800/314; 800/322; 800/298; 800/312; 800/320.3

(57) ABSTRACT

Methods and materials for modulating heat and/or drought tolerance in plants are disclosed. For example, nucleic acids encoding heat and/or drought-tolerance polypeptides are disclosed as well as methods for using such nucleic acids to transform plant cells. Also disclosed are plants having increased heat and/or drought tolerance and plant products produced from plants having increased heat and/or drought tolerance.

### INCORPORATION-BY-REFERENCE OF SEQUENCE LISTING OR TABLE

[0001] The material in the accompanying sequence listing is hereby incorporated by reference into this application. The accompanying file, named 11696-248WO1_sequence_listing was created on Feb. 5, 2009 and is 3090 KB. The file can be accessed using Microsoft Word on a computer that uses Windows OS.

### TECHNICAL FIELD

[0002] This document relates to methods and materials involved in modulating drought and/or heat tolerance in plants. For example, this document provides plants having increased drought and/or heat tolerance as well as materials and methods for making plants having increased drought and/or heat tolerance.

### BACKGROUND

[0003] Due to their sessile nature, plants are constantly under the threat of temperature stress when they are subjected to a wide range of temperature variation in different habitats and climates during growing seasons and even diurnally. Most economically valuable plants, including those used in agriculture, horticulture, forestry, biomass for bioconversion, and other industries (e.g., the paper industry or pharmaceutical/chemical industries where plants are used as production factories for proteins or other compounds) are exposed to higher than optimal temperatures, or heat stress, during some stages of their life cycle from seed germination to seed maturation (Maestri et al. Plant Mol. Biol. 48:667-681 (2002)). Heat stress is one of the most common stresses in crop production. Under heat stress, plants can succumb to a variety of physiological and developmental damages, including dehydration due to increased transpiration, impairment of photosynthetic carbon assimilation, inhibition of translocation of assimilates, increased respiration, reduced organ size due to a decrease in the duration of developmental phases, disruption of seed development, and a reduction in fertility (Berry and Bjorkman, Ann. Rev. Plant Physiol. 31:491-543 (1980); Cheikh and Jones, Plant Physiol. 106:45-51 (1994)). Thus, exposure to heat stress often results in reduced yield and overall decreased crop quality (Maestri et al. Plant Mol. Biol. 48:667-681 (2002)).

[0004] In the field, heat stress is often associated with other stresses, such as drought and high light, which presents even greater challenge to plants. Plants exposed to low water or drought conditions typically have low yields of plant material, seeds, fruit and other edible products. Some areas of the world consistently have very low rainfall and therefore have problems growing sufficient food crops for their population.

[0005] Thus, there is a need for methods of increasing drought and/or heat tolerance in plants.

### SUMMARY

[0006] This document provides methods and materials related to plants having increased heat and/or drought tolerance. For example, this document provides transgenic plants and plant cells having increased heat and/or drought tolerance, nucleic acids used to generate transgenic plants and plant cells having increased heat and/or drought tolerance, and methods for making plants and plant cells having increased heat and/or drought tolerance. Such plants having increased heat and/or drought tolerance may be useful to produce biomass which may be converted to a liquid fuel or other chemicals and/or to produce crops with increased yield and/or quality.

[0007] Methods of producing a plant are provided herein. In one aspect, a method comprises growing a plant cell comprising an exogenous nucleic acid. The exogenous nucleic acid comprises a regulatory region operably linked to a nucleotide sequence encoding a polypeptide. The Hidden Markov Model (HMM) bit score of the amino acid sequence of the polypeptide is greater than about 20, using an HMM generated from the amino acid sequences depicted in one of FIGS. 1-16. The plant has a difference in drought tolerance or heat tolerance as compared to a control plant that does not comprise the exogenous nucleic acid.

[0008] In another aspect, a method comprises growing a plant cell comprising an exogenous nucleic acid. The exogenous nucleic acid comprises a regulatory region operably linked to a nucleotide sequence encoding a polypeptide having 80 percent or greater sequence identity to an amino acid sequence set forth in SEQ ID NO: 2, 3, 4, 5, 6, 7, 8, 9, 10, 11, 13, 15, 17, 19, 21, 23, 25, 27, 29, 31, 33, 35, 37, 39, 41, 43, 45, 47, 49, 51, 53, 55, 57, 60, 62, 63, 64, 65, 66, 67, 68, 69, 70, 71, 73, 74, 76, 78, 80, 82, 84, 86, 88, 90, 92, 94, 96, 98, 100, 102, 104, 106, 108, 110, 112, 114, 116, 118, 120, 122, 124, 126, 127, 130, 132, 134, 136, 138, 139, 142, 144, 146, 148, 150, 152, 154, 156, 158, 160, 162, 164, 166, 168, 170, 172, 174, 176, 178, 179, 180, 182, 184, 186, 188, 190, 192, 194, 196, 198, 200, 202, 204, 206, 208, 209, 212, 214, 216, 218, 220, 222, 224, 225, 228, 229, 231, 233, 234, 235, 237, 239, 240, 242, 244, 246, 248, 250, 252, 253, 254, 256, 258, 260, 262, 264, 266, 268, 269, 271, 273, 275, 277, 279, 280, 282, 284, 286, 288, 289, 290, 291, 292, 293, 294, 295, 296, 297, 298, 299, 300, 301, 302, 303, 304, 305, 307, 309, 311, 312, 314, 315, 316, 317, 319, 320, 321, 322, 323, 325, 326, 327, 329, 330, 332, 334, 335, 336, 337, 338, 339, 340, 341, 343, 344, 346, 348, 349, 350, 351, 353, 355, 356, 358, 360, 362, 364, 366, 368, 369, 370, 371, 373, 375, 377, 379, 381, 383, 385, 387, 389, 390, 392, 394, 396, 398, 400, 401, 402, 404, 405, 407, 408, 410, 412, 413, 414, 416, 418, 419, 420, 421, 422, 423, 424, 426, 428, 430, 431, 432, 433, 434, 435, 436, 438, 440, 442, 443, 445, 447, 449, 451, 453, 455, 457, 459, 461, 463, 465, 467, 469, 470, 472, 474, 476, 478, 480, 481, 483, 485, 487, 489, 490, 491, 492, 494, 496, 498, 500, 502, 504, 506, 508, 510, 512, 514, 515, 516, 518, 519, 520, 522, 524, 526, 528, 530, 531, 533, 535, 536, 538, 540, 541, 543, 545, 547, 548, 550, 552, 553, 555, 557, 558, 559, 561, 562, 564, 566, 568, 569, 570, 572, 574, 576, 578, 580, 582, 584, 586, 588, 590, 591, 592, 593, 594, 595, 596, 597, 598, 599, 600, 602, 603, 604, 605, 607, 608, 610, 612, 614, 615, 616, 617, 618, 619, 620, 621, 623, 625, 627, 629, 631, 632, 634, 635, 636, 638, 640, 642, 644, 646, 647, 648, 650, 651, 653, 654, 655, 656, 658, 660, 661, 662, 663, 664, 665, 666, 667, 668, 669, 671, 673, 674, 675, 676, 678, 680, 682, 684, 685, 687, 688, 690, 691, 692, 694, 696, 698, 700, 702, 705, 706, 707, 708, 709, 711, 712, 714, 715, 717, 719, 721, 723, 725, 726, 727, 729, 731, 733, 734, 735, 737, 738, 740, 741, 742, 743, 744, 745, 746, 747, 748, 749, 751, 752, 753, 754, 755, 756, 757, 759, 760, 761, 763, 765, 767, 768, 769, 771, 773, 774, 775, 777, 779, 781, 783, 785, 787, 789, 791, 793, 795, 796, 797, 798, 799, 801, 803, 805, 807, 808, 809, 810, 811, 812, 813, 815, 816, 817, 819, 821, 823, 825, 827, 829, 832, 834, 836, 839, 840, 841, 842, 843, 844, 845, 846, 848, 849, 850, 851, 852, 853, 854, 856, 857, 859, 861, 863, 865, 867, 869, 870, 871, 872, 873, 874, 876, 878, 880, 882, 885, 886, 887, 888, 889, 890, 891, 892, 893, 894, 896, 897, 898, 900, 901, 902, 904, 906, 908, 910, 912, 913, 914, 915, 916, 918, 920, 922, 924, 926, 929, 931, 932, 933, 935, 937, 939, 941, 943, 944, 945, 947, 949, 951, 952, 953, 955, 957, 958, 959, 960, 961, 962, 963, 964, 966, 968, 969, 970, 971, 973, 974, 975, 977, 978, 979, 980, 981, 983, 985, 987, 988, 989, 990, 991, 992, 993, 995, 997, 998, 999, 1000, 1001, 1003, 1005, 1007, 1010, 1012, 1013, 1014, 1015, 1016, 1018, 1020, 1022, 1023, 1025, 1027, 1028, 1030, 1031, 1033, 1035, 1037, 1039, 1041, 1043, 1045, 1046, 1048, 1050, 1051, 1053, 1055, 1056, 1058, 1059, 1061, 1062, 1064, 1066, 1068, 1069, 1071, 1073, 1075, 1077, 1079, 1080, 1082, 1084, 1086, 1088, 1090, 1092, 1093, 1094, 1096, 1098, 1100, 1102, 1104, 1106, 1108, 1110, 1112, 1113, 1114, 1116, 1117, 1118, 1119, 1121, 1123, 1125, 1129, 1130, 1131, 1132, 1133, 1134, 1135, 1136, 1137, 1138, 1140, 1142, 1144, 1146, 1148, 1150, 1151, 1152, 1153, 1154, 1156, 1157, 1158, 1159, 1160, 1161, 1162, 1164, 1166, 1168, 1170, 1172, 1174, 1175, 1177, 1179, 1181, 1182, 1184, 1186, 1188, 1189, 1191, 1193, 1195, 1197, 1199, 1201, 1203, 1205, 1207, 1209, 1210, 1212, 1214, 1215, 1216, 1218, 1219, 1221, 1222, 1223, 1225, 1226, 1228, 1230, 1231, 1232, 1234, 1236, 1238, 1240, 1242, 1244, 1246, 1248, 1250, 1252, 1254, 1256, 1258, 1262, 1264, 1265, 1267, 1269, 1271, 1273, 1274, 1276, 1277, 1279, 1281, 1283, 1285, 1286, 1287, 1288, 1290, 1292, 1293, 1294, 1296, 1298, 1300, 1302, 1304, 1306, 1311, 1313, 1315, 1317, 1319, 1321, 1323, 1324, 1325, 1326, 1327, 1329, 1331, 1333, 1334, 1336, 1338, 1340, 1342, 1343, 1345, 1347, 1349, 1350, 1351, 1353, 1354, 1356, 1358, 1360, or 1361. A plant produced from the plant cell has a difference in drought tolerance or heat tolerance compared to a control plant that does not comprise the exogenous nucleic acid.

[0009] In another aspect, the polypeptide can comprise a sulfotransferase 1 domain having 70 percent or greater sequence identity to the sulfotransferase 1 domain of SEQ ID NO:590 or orthologs thereof such as those identified in the sequence listing; an AN1-like zinc finger domain having 70 percent or greater sequence identity to the AN1-like zinc finger domain of SEQ ID NO:742 or SEQ ID NO:749 or orthologs thereof such as those identified in the sequence listing and an A20-like zinc finger domain having 70 percent or greater sequence identity to the A20-like zinc finger domain of SEQ ID NO:742 or SEQ ID NO:749 or orthologs thereof such as those identified in the sequence listing; a short chain dehydrogenase domain having 70 percent or greater sequence identity to the short chain dehydrogenase domain of SEQ ID NO:1012 or orthologs thereof such as those identified in the sequence listing; a trehalose-phosphatase domain having 70 percent or greater sequence identity to the trehalose-phosphatase domain of or SEQ ID NO:1129 or orthologs thereof such as those identified in the sequence listing; a synaptobrevin-related polypeptide having 70 percent or greater sequence identity to the synaptobrevin-related polypeptide of SEQ ID NO:160 or orthologs thereof such as those identified in the sequence listing; an HSF-type DNA-binding domain having 70 percent or greater sequence identity to the HSF-type DNA-binding domain of SEQ ID NO:311 or SEQ ID NO:364 or orthologs thereof such as those identified in the sequence listing; a DnaJ domain having 70 percent or greater sequence identity to the DnaJ domain of SEQ ID NO:60 or orthologs thereof such as those identified in the sequence listing; or a KH_{—}2 domain having 70 percent or greater sequence identity to the KH_{—}2 domain of SEQ ID NO:1311 or orthologs thereof such as those identified in the sequence listing.

[0010] In another aspect, a method comprises growing a plant cell comprising an exogenous nucleic acid. The exogenous nucleic acid comprises a regulatory region operably linked to a nucleotide sequence having 80 percent or greater sequence identity to a nucleotide sequence, or a fragment thereof, set forth in SEQ ID NO: 1, 12, 14, 16, 18, 20, 22, 24, 26, 28, 30, 32, 34, 36, 38, 40, 42, 44, 46, 48, 50, 52, 54, 56, 58, 59, 61, 72, 75, 77, 79, 81, 83, 85, 87, 89, 91, 93, 95, 97, 99, 101, 103, 105, 107, 109, 111, 113, 115, 117, 119, 121, 123, 125, 128, 129, 131, 133, 135, 137, 140, 141, 143, 145, 147, 149, 151, 153, 155, 157, 159, 161, 163, 165, 167, 169, 171, 173, 175, 177, 181, 183, 185, 187, 189, 191, 193, 195, 197, 199, 201, 203, 205, 207, 210, 211, 213, 215, 217, 219, 221, 223, 226, 227, 230, 232, 236, 238, 241, 243, 245, 247, 249, 251, 255, 257, 259, 261, 263, 265, 267, 270, 272, 274, 276, 278, 281, 283, 285, 287, 306, 308, 310, 313, 318, 324, 328, 331, 333, 342, 345, 347, 352, 354, 357, 359, 361, 363, 365, 367, 372, 374, 376, 378, 380, 382, 384, 386, 388, 391, 393, 395, 397, 399, 403, 406, 409, 411, 415, 417, 425, 427, 429, 437, 439, 441, 444, 446, 448, 450, 452, 454, 456, 458, 460, 462, 464, 466, 468, 471, 473, 475, 477, 479, 482, 484, 486, 488, 493, 495, 497, 499, 501, 503, 505, 507, 509, 511, 513, 517, 521, 523, 525, 527, 529, 532, 534, 537, 539, 542, 544, 546, 549, 551, 554, 556, 560, 563, 565, 567, 571, 573, 575, 577, 579, 581, 583, 585, 587, 589, 601, 606, 609, 611, 613, 622, 624, 626, 628, 630, 633, 637, 639, 641, 643, 645, 649, 652, 657, 659, 670, 672, 677, 679, 681, 683, 686, 689, 693, 695, 697, 699, 701, 703, 704, 710, 713, 716, 718, 720, 722, 724, 728, 730, 732, 736, 739, 750, 758, 762, 764, 766, 770, 772, 776, 778, 780, 782, 784, 786, 788, 790, 792, 794, 800, 802, 804, 806, 814, 818, 820, 822, 824, 826, 828, 830, 831, 833, 835, 837, 838, 847, 855, 858, 860, 862, 864, 866, 868, 875, 877, 879, 881, 883, 884, 895, 899, 903, 905, 907, 909, 911, 917, 919, 921, 923, 925, 927, 928, 930, 934, 936, 938, 940, 942, 946, 948, 950, 954, 956, 965, 967, 972, 976, 982, 984, 986, 994, 996, 1002, 1004, 1006, 1008, 1009, 1011, 1017, 1019, 1021, 1024, 1026, 1029, 1032, 1034, 1036, 1038, 1040, 1042, 1044, 1047, 1049, 1052, 1054, 1057, 1060, 1063, 1065, 1067, 1070, 1072, 1074, 1076, 1078, 1081, 1083, 1085, 1087, 1089, 1091, 1095, 1097, 1099, 1101, 1103, 1105, 1107, 1109, 1111, 1115, 1120, 1122, 1124, 1126, 1127, 1128, 1139, 1141, 1143, 1145, 1147, 1149, 1155, 1163, 1165, 1167, 1169, 1171, 1173, 1176, 1178, 1180, 1183, 1185, 1187, 1190, 1192, 1194, 1196, 1198, 1200, 1202, 1204, 1206, 1208, 1211, 1213, 1217, 1220, 1224, 1227, 1229, 1233, 1235, 1237, 1239, 1241, 1243, 1245, 1247, 1249, 1251, 1253, 1255, 1257, 1259, 1260, 1261, 1263, 1266, 1268, 1270, 1272, 1275, 1278, 1280, 1282, 1284, 1289, 1291, 1295, 1297, 1299, 1301, 1303, 1305, 1312, 1314, 1316, 1318, 1320, 1322, 1328, 1330, 1332, 1335, 1337, 1339, 1341, 1344, 1346, 1348, 1352, 1355, 1357, 1359 or 1362, or a fragment thereof. A plant produced from the plant cell has a difference in drought tolerance or heat tolerance as compared to a control plant that does not comprise the exogenous nucleic acid.

[0011] Methods of modulating drought in a plant are provided herein. In one aspect, a method comprises introducing into a plant cell an exogenous nucleic acid, that comprises a regulatory region operably linked to a nucleotide sequence encoding a polypeptide. The HMM bit score of the amino acid sequence of the polypeptide is greater than about 20, using an HMM generated from the amino acid sequences depicted in one of FIGS. 1-16. A plant produced from the plant cell has a difference in drought tolerance as compared to a control plant that does not comprise the exogenous nucleic acid.

[0012] In another aspect, a method of modulating drought tolerance comprises introducing into a plant cell an exogenous nucleic acid that comprises a regulatory region operably linked to a nucleotide sequence encoding a polypeptide having 80 percent or greater sequence identity to an amino acid sequence set forth in SEQ ID NO: 442, 443, 445, 447, 449, 451, 453, 455, 457, 459, 461, 463, 465, 469, 470, 472, 474, 476, 478, 480, 481, 483, 485, 487, 966, 968, 969, 970, 902, 904, 906, 908, 910, 913, 914, 920, 748, 749, 797, 803, 821, 1189, 1191, 1193, 1195, 1197, 1199, 1201, 1203, 1205, 1207, 1209, 1210, 1212, 1214, 1215, 1216, 1218, 1219, 1221, 1222, 1223, 1225, 1226, 1228, 1230, 1231, 1232, 1234, 1236, 1238, 1240, 1244, 1246, 1248, 1250, 1252, 1254, 1256, 1258, 1296, 1298, 1300, 1302, 1304, 489, 490, 491, 492, 494, 496, 498, 500, 502, 504, 506, 508, 510, 512, 514, 515, 516, 518, 519, 520, 522, 524, 526, 528, 530, 531, 533, 535, 536, 538, 540, 541, 543, 545, 547, 548, 550, 552, 553, 555, 557, 558, 561, 562, 564, 566, 856, 869, 870, 871, 872, 873, 874, 568, 569, 570, 572, 574, 576, 578, 580, 582, 584, 586, 588, 795, 590, 591, 592, 593, 594, 595, 596, 597, 598, 599, 600, 602, 603, 604, 605, 607, 608, 610, 612, 614, 615, 616, 617, 618, 619, 620, 621, 623, 625, 627, 629, 631, 632, 634, 635, 636, 638, 640, 642, 644, 646, 647, 650, 651, 653, 654, 655, 656, 658, 660, 661, 662, 663, 664, 665, 666, 667, 668, 669, 671, 673, 674, 675, 676, 678, 680, 682, 684, 685, 687, 688, 690, 691, 692, 694, 696, 698, 700, 702, 971, 974, 975, 978, 979, 980, 981, 983, 985, 987, 995, 997, 705, 706, 707, 708, 709, 711, 712, 714, 715, 717, 719, 721, 723, 725, 727, 729, 731, 733, 734, 735, 737, 738, 740, 746, 747, 751, 752, 787, 742, 743, 744, 745, 757, 759, 761, 763, 767, 771, 796, 798, 799, 801, 805, 807, 808, 809, 810, 811, 812, 813, 815, 816, 817, 819, 823, 825, 832, 834, 836, 839, 846, 848, 857, 859, 863, 885, 892, 900, 912, 918, 939, 944, 953, 955, 957, 973, 977, 988, 989, 990, 991, 992, 993, 999, 1000, 1010, 1242, 922, 924, 929, 931, 935, 937, 941, 943, 947, 949, 951, 952, 958, 959, 960, 961, 962, 963, 964, 1012, 1013, 1014, 1015, 1016, 1018, 1020, 1022, 1023, 1025, 1027, 1028, 1030, 1031, 1033, 1035, 1037, 1039, 1041, 1045, 1048, 1050, 1051, 1053, 1055, 1056, 1058, 1061, 1062, 1064, 1066, 1068, 1071, 1073, 1075, 1077, 1079, 1080, 1082, 1084, 1086, 1088, 1090, 1092, 1093, 1094, 1096, 1098, 1100, 1102, 1104, 1106, 1108, 1110, 1112, 1113, 1114, 1116, 1117, 1118, 1119, 1121, 1123, 1125, 1292, 63, 73, 96, 127, 139, 179, 180, 209, 467, 559, 648, 726, 741, 765, 773, 781, 827, 829, 840, 841, 842, 843, 844, 845, 849, 850, 851, 852, 853, 854, 861, 865, 867, 896, 916, 926, 932, 933, 1043, 1046, 1059, 1069, 1129, 1130, 1131, 1132, 1133, 1134, 1135, 1136, 1137, 1138, 1140, 1142, 1144, 1146, 1148, 1150, 1151, 1152, 1153, 1154, 1156, 1157, 1158, 1159, 1160, 1161, 1162, 1164, 1166, 1168, 1170, 1172, 1174, 1175, 1177, 1179, 1181, 1182, 1184, 1186, 1294, 1311, 1313, 1315, 1317, 1319, 1321, 1323, 1324, 1325, 1326, 1327, 1329, 1331, 1333, 1334, 1336, 1338, 1340, 1342, 1343, 1345, 1347, 1349, 1350, 1351, 1353, 1354, 1356, 1358, 1360, or 1361. A plant produced from the plant cell has a difference in drought tolerance as compared to a control plant that does not comprise the exogenous nucleic acid.

[0013] In another aspect, a method of modulating drought tolerance comprises introducing into a plant cell an exogenous nucleic acid, that comprises a regulatory region operably linked to a nucleotide sequence having 80 percent or greater sequence identity to a nucleotide sequence set forth in SEQ ID NO: 923, 994, 905, 921, 804, 837, 828, 930, 996, 928, 868, 645, 641, 695, 505, 1067, 501, 466, 718, 860, 503, 624, 628, 630, 639, 686, 806, 479, 764, 1060, 1052, 1120, 1105, 546, 780, 460, 814, 800, 499, 643, 670, 679, 1253, 927, 716, 1081, 128, 585, 581, 864, 1049, 1107, 523, 1076, 652, 1095, 1099, 1101, 497, 830, 507, 622, 140, 772, 532, 542, 549, 226, 1149, 210, 587, 583, 866, 527, 1097, 1103, 1141, 1019, 486, 1229, 1249, 739, 697, 701, 1011, 563, 1122, 1243, 1208, 1247, 1009, 1124, 699, 1206, 72, 565, 1245, 1021, 1008, 942, 948, 818, 794, 967, 986, 786, 936, 940, 984, 855, 946, 982, 1291, 919, 822, 824, 907, 750, 909, 934, 903, 826, 95, 965, 950, 611, 575, 1190, 484, 454, 1036, 722, 444, 456, 1192, 1034, 720, 831, 911, 838, 917, 468, 1257, 659, 1173, 1139, 1176, 938, 1063, 1032, 862, 758, 450, 509, 554, 1259, 458, 1217, 972, 477, 462, 954, 1163, 956, 525, 556, 1145, 1165, 1065, 677, 609, 762, 537, 1169, 884, 1198, 1085, 1109, 1211, 1029, 689, 1070, 1233, 770, 1047, 1194, 551, 446, 633, 1167, 1078, 1213, 730, 448, 766, 895, 511, 925, 495, 1239, 1235, 1057, 1074, 1202, 544, 1083, 1024, 1220, 1224, 1200, 613, 683, 672, 976, 517, 1227, 471, 1255, 1237, 473, 728, 521, 464, 1241, 1155, 681, 736, 539, 1017, 513, 835, 657, 534, 1044, 649, 1026, 560, 1171, 579, 1038, 529, 1091, 1147, 637, 452, 1072, 1180, 833, 1040, 1089, 482, 493, 732, 1115, 626, 899, 606, 1178, 1087, 1042, 1111, 577, 1251, 475, 858, 724, 1183, 693, 1143, 1185, 1054, 1187, 571, 713, 847, 1196, 573, 1204, 601, 441, 488, 567, 589, 703, 704, 710, 1260, 1126, 1127, 1128, 1295, 802, 1303, 1297, 1301, 1299, 820, 1312, 1314, 1316, 1318, 1320, 1322, 1328, 1330, 1332, 1335, 1337, 1339, 1341, 1344, 1346, 1348, 1352, 1355, 1357, 1359 or 1362, or a fragment thereof. A plant produced from the plant cell has a difference in drought tolerance as compared to a control plant that does not comprise the exogenous nucleic acid.

[0014] Methods of modulating heat in a plant are provided herein. In one aspect, a method comprises introducing into a plant cell an exogenous nucleic acid, that comprises a regulatory region operably linked to a nucleotide sequence encoding a polypeptide. The HMM bit score of the amino acid sequence of the polypeptide is greater than about 20, using an HMM generated from the amino acid sequences depicted in one of FIGS. 10-14. A plant produced from the plant cell has a difference in heat tolerance as compared to a control plant that does not comprise the exogenous nucleic acid.

[0015] In another aspect, a method of modulating heat tolerance comprises introducing into a plant cell an exogenous nucleic acid that comprises a regulatory region operably linked to a nucleotide sequence encoding a polypeptide having 80 percent or greater sequence identity to an amino acid sequence set forth in SEQ ID NO: 60, 62, 64, 65, 66, 67, 68, 69, 70, 71, 74, 76, 78, 80, 82, 84, 86, 88, 90, 92, 94, 98, 100, 102, 104, 106, 108, 110, 112, 114, 116, 118, 120, 122, 124, 126, 130, 132, 134, 136, 138, 142, 144, 146, 148, 150, 152, 154, 156, 158, 915, 364, 366, 368, 369, 370, 371, 373, 375, 377, 379, 381, 383, 385, 387, 389, 390, 392, 394, 396, 398, 400, 401, 402, 404, 405, 407, 408, 410, 412, 413, 414, 416, 418, 419, 420, 421, 422, 423, 424, 426, 428, 430, 431, 432, 433, 434, 435, 436, 438, 440, 753, 754, 755, 756, 760, 768, 769, 774, 775, 777, 779, 783, 785, 789, 791, 793, 945, 1293, 311, 312, 314, 315, 316, 317, 319, 320, 321, 322, 323, 325, 326, 327, 329, 330, 332, 334, 335, 336, 337, 338, 339, 340, 341, 343, 344, 346, 348, 349, 350, 351, 353, 355, 356, 358, 360, 362, 876, 878, 880, 882, 886, 887, 888, 889, 890, 891, 893, 894, 897, 898, 901, 160, 162, 164, 166, 168, 170, 172, 174, 176, 178, 182, 184, 186, 188, 190, 192, 194, 196, 198, 200, 202, 204, 206, 208, 212, 214, 216, 218, 220, 222, 224, 225, 228, 229, 231, 233, 234, 235, 237, 239, 240, 242, 244, 246, 248, 250, 252, 253, 254, 256, 258, 260, 262, 264, 266, 268, 269, 271, 273, 275, 277, 279, 280, 282, 284, 286, 288, 289, 290, 291, 292, 293, 294, 295, 296, 297, 298, 299, 300, 301, 302, 303, 304, 305, 307, 309, 998, 1001, 1003, 1005, 1007, 1188, 1262, 1264, 1265, 1267, 1269, 1271, 1273, 1274, 1276, 1277, 1279, 1281, 1283, 1285, 1286, 1287, 1288, 1290, 2, 3, 4, 5, 6, 7, 8, 9, 10, 11, 13, 15, 17, 19, 21, 23, 25, 27, 29, 31, 33, 35, 37, 39, 41, 43, 45, 47, 49, 51, 53, 55, 902, 904, 906, 908, 910, 913, 914, or 920. A plant produced from the plant cell has a difference in heat tolerance as compared to a control plant that does not comprise the exogenous nucleic acid.

[0016] In another aspect, a method of modulating heat tolerance comprises introducing into a plant cell an exogenous nucleic acid, that comprises a regulatory region operably linked to a nucleotide sequence having 80 percent or greater sequence identity to a nucleotide sequence set forth in SEQ ID NO: 877, 1263, 790, 1261, 875, 792, 201, 354, 85, 77, 75, 415, 46, 207, 333, 203, 382, 83, 411, 81, 425, 406, 189, 93, 223, 44, 345, 79, 199, 417, 42, 219, 352, 185, 193, 89, 205, 386, 365, 91, 211, 195, 217, 429, 213, 187, 221, 359, 40, 197, 357, 331, 215, 183, 191, 367, 318, 87, 378, 48, 157, 155, 306, 361, 439, 52, 50, 437, 308, 54, 153, 1002, 782, 1266, 1268, 1275, 881, 784, 1278, 1280, 1004, 778, 879, 1282, 1006, 1289, 1284, 1270, 788, 883, 1272, 776, 135, 259, 109, 245, 121, 28, 115, 261, 151, 145, 328, 313, 24, 20, 391, 99, 409, 272, 1, 342, 347, 374, 131, 372, 111, 103, 107, 388, 125, 117, 18, 380, 123, 129, 26, 399, 143, 283, 30, 167, 403, 287, 137, 281, 169, 161, 14, 165, 181, 12, 38, 163, 173, 324, 177, 34, 97, 175, 171, 101, 285, 36, 276, 274, 232, 56, 270, 376, 278, 58, 59, 16, 230, 141, 32, 267, 227, 159, 241, 133, 249, 397, 247, 263, 149, 393, 395, 257, 243, 251, 113, 265, 119, 384, 427, 147, 255, 61, 22, 238, 236, 105, 310, or 363, or a fragment thereof. A plant produced from the plant cell has a difference in heat tolerance as compared to a control plant that does not comprise the exogenous nucleic acid.

[0017] Plant cells comprising an exogenous nucleic acid are provided herein. In one aspect, the exogenous nucleic acid comprises a regulatory region operably linked to a nucleotide sequence encoding a polypeptide. The HMM bit score of the amino acid sequence of the polypeptide is greater than about 20, using an HMM based on the amino acid sequences depicted in one of FIGS. 1-16. A plant produced from the cells has a difference in drought tolerance or heat tolerance as compared to a control plant that does not comprise the exogenous nucleic acid. In another aspect, the exogenous nucleic acid comprises a regulatory region operably linked to a nucleotide sequence encoding a polypeptide having 80 percent or greater sequence identity to an amino acid sequence selected from the group consisting of SEQ ID NO: 2, 3, 4, 5, 6, 7, 8, 9, 10, 11, 13, 15, 17, 19, 21, 23, 25, 27, 29, 31, 33, 35, 37, 39, 41, 43, 45, 47, 49, 51, 53, 55, 57, 60, 62, 63, 64, 65, 66, 67, 68, 69, 70, 71, 73, 74, 76, 78, 80, 82, 84, 86, 88, 90, 92, 94, 96, 98, 100, 102, 104, 106, 108, 110, 112, 114, 116, 118, 120, 122, 124, 126, 127, 130, 132, 134, 136, 138, 139, 142, 144, 146, 148, 150, 152, 154, 156, 158, 160, 162, 164, 166, 168, 170, 172, 174, 176, 178, 179, 180, 182, 184, 186, 188, 190, 192, 194, 196, 198, 200, 202, 204, 206, 208, 209, 212, 214, 216, 218, 220, 222, 224, 225, 228, 229, 231, 233, 234, 235, 237, 239, 240, 242, 244, 246, 248, 250, 252, 253, 254, 256, 258, 260, 262, 264, 266, 268, 269, 271, 273, 275, 277, 279, 280, 282, 284, 286, 288, 289, 290, 291, 292, 293, 294, 295, 296, 297, 298, 299, 300, 301, 302, 303, 304, 305, 307, 309, 311, 312, 314, 315, 316, 317, 319, 320, 321, 322, 323, 325, 326, 327, 329, 330, 332, 334, 335, 336, 337, 338, 339, 340, 341, 343, 344, 346, 348, 349, 350, 351, 353, 355, 356, 358, 360, 362, 364, 366, 368, 369, 370, 371, 373, 375, 377, 379, 381, 383, 385, 387, 389, 390, 392, 394, 396, 398, 400, 401, 402, 404, 405, 407, 408, 410, 412, 413, 414, 416, 418, 419, 420, 421, 422, 423, 424, 426, 428, 430, 431, 432, 433, 434, 435, 436, 438, 440, 442, 443, 445, 447, 449, 451, 453, 455, 457, 459, 461, 463, 465, 467, 469, 470, 472, 474, 476, 478, 480, 481, 483, 485, 487, 489, 490, 491, 492, 494, 496, 498, 500, 502, 504, 506, 508, 510, 512, 514, 515, 516, 518, 519, 520, 522, 524, 526, 528, 530, 531, 533, 535, 536, 538, 540, 541, 543, 545, 547, 548, 550, 552, 553, 555, 557, 558, 559, 561, 562, 564, 566, 568, 569, 570, 572, 574, 576, 578, 580, 582, 584, 586, 588, 590, 591, 592, 593, 594, 595, 596, 597, 598, 599, 600, 602, 603, 604, 605, 607, 608, 610, 612, 614, 615, 616, 617, 618, 619, 620, 621, 623, 625, 627, 629, 631, 632, 634, 635, 636, 638, 640, 642, 644, 646, 647, 648, 650, 651, 653, 654, 655, 656, 658, 660, 661, 662, 663, 664, 665, 666, 667, 668, 669, 671, 673, 674, 675, 676, 678, 680, 682, 684, 685, 687, 688, 690, 691, 692, 694, 696, 698, 700, 702, 705, 706, 707, 708, 709, 711, 712, 714, 715, 717, 719, 721, 723, 725, 726, 727, 729, 731, 733, 734, 735, 737, 738, 740, 741, 742, 743, 744, 745, 746, 747, 748, 749, 751, 752, 753, 754, 755, 756, 757, 759, 760, 761, 763, 765, 767, 768, 769, 771, 773, 774, 775, 777, 779, 781, 783, 785, 787, 789, 791, 793, 795, 796, 797, 798, 799, 801, 803, 805, 807, 808, 809, 810, 811, 812, 813, 815, 816, 817, 819, 821, 823, 825, 827, 829, 832, 834, 836, 839, 840, 841, 842, 843, 844, 845, 846, 848, 849, 850, 851, 852, 853, 854, 856, 857, 859, 861, 863, 865, 867, 869, 870, 871, 872, 873, 874, 876, 878, 880, 882, 885, 886, 887, 888, 889, 890, 891, 892, 893, 894, 896, 897, 898, 900, 901, 902, 904, 906, 908, 910, 912, 913, 914, 915, 916, 918, 920, 922, 924, 926, 929, 931, 932, 933, 935, 937, 939, 941, 943, 944, 945, 947, 949, 951, 952, 953, 955, 957, 958, 959, 960, 961, 962, 963, 964, 966, 968, 969, 970, 971, 973, 974, 975, 977, 978, 979, 980, 981, 983, 985, 987, 988, 989, 990, 991, 992, 993, 995, 997, 998, 999, 1000, 1001, 1003, 1005, 1007, 1010, 1012, 1013, 1014, 1015, 1016, 1018, 1020, 1022, 1023, 1025, 1027, 1028, 1030, 1031, 1033, 1035, 1037, 1039, 1041, 1043, 1045, 1046, 1048, 1050, 1051, 1053, 1055, 1056, 1058, 1059, 1061, 1062, 1064, 1066, 1068, 1069, 1071, 1073, 1075, 1077, 1079, 1080, 1082, 1084, 1086, 1088, 1090, 1092, 1093, 1094, 1096, 1098, 1100, 1102, 1104, 1106, 1108, 1110, 1112, 1113, 1114, 1116, 1117, 1118, 1119, 1121, 1123, 1125, 1129, 1130, 1131, 1132, 1133, 1134, 1135, 1136, 1137, 1138, 1140, 1142, 1144, 1146, 1148, 1150, 1151, 1152, 1153, 1154, 1156, 1157, 1158, 1159, 1160, 1161, 1162, 1164, 1166, 1168, 1170, 1172, 1174, 1175, 1177, 1179, 1181, 1182, 1184, 1186, 1188, 1189, 1191, 1193, 1195, 1197, 1199, 1201, 1203, 1205, 1207, 1209, 1210, 1212, 1214, 1215, 1216, 1218, 1219, 1221, 1222, 1223, 1225, 1226, 1228, 1230, 1231, 1232, 1234, 1236, 1238, 1240, 1242, 1244, 1246, 1248, 1250, 1252, 1254, 1256, 1258, 1262, 1264, 1265, 1267, 1269, 1271, 1273, 1274, 1276, 1277, 1279, 1281, 1283, 1285, 1286, 1287, 1288, 1290, 1292, 1293, 1294, 1296, 1298, 1300, 1302, 1304, or 1311, 1313, 1315, 1317, 1319, 1321, 1323, 1324, 1325, 1326, 1327, 1329, 1331, 1333, 1334, 1336, 1338, 1340, 1342, 1343, 1345, 1347, 1349, 1350, 1351, 1353, 1354, 1356, 1358, 1360, or 1361. A plant produced from the plant cell has a difference in drought tolerance or heat tolerance as compared to a control plant that does not comprise the exogenous nucleic acid.

[0018] In another aspect, the exogenous nucleic acid comprises a regulatory region operably linked to a nucleotide sequence having 80 percent or greater sequence identity to a nucleotide sequence selected from the group consisting of SEQ ID NO: 1, 12, 14, 16, 18, 20, 22, 24, 26, 28, 30, 32, 34, 36, 38, 40, 42, 44, 46, 48, 50, 52, 54, 56, 58, 59, 61, 72, 75, 77, 79, 81, 83, 85, 87, 89, 91, 93, 95, 97, 99, 101, 103, 105, 107, 109, 111, 113, 115, 117, 119, 121, 123, 125, 128, 129, 131, 133, 135, 137, 140, 141, 143, 145, 147, 149, 151, 153, 155, 157, 159, 161, 163, 165, 167, 169, 171, 173, 175, 177, 181, 183, 185, 187, 189, 191, 193, 195, 197, 199, 201, 203, 205, 207, 210, 211, 213, 215, 217, 219, 221, 223, 226, 227, 230, 232, 236, 238, 241, 243, 245, 247, 249, 251, 255, 257, 259, 261, 263, 265, 267, 270, 272, 274, 276, 278, 281, 283, 285, 287, 306, 308, 310, 313, 318, 324, 328, 331, 333, 342, 345, 347, 352, 354, 357, 359, 361, 363, 365, 367, 372, 374, 376, 378, 380, 382, 384, 386, 388, 391, 393, 395, 397, 399, 403, 406, 409, 411, 415, 417, 425, 427, 429, 437, 439, 441, 444, 446, 448, 450, 452, 454, 456, 458, 460, 462, 464, 466, 468, 471, 473, 475, 477, 479, 482, 484, 486, 488, 493, 495, 497, 499, 501, 503, 505, 507, 509, 511, 513, 517, 521, 523, 525, 527, 529, 532, 534, 537, 539, 542, 544, 546, 549, 551, 554, 556, 560, 563, 565, 567, 571, 573, 575, 577, 579, 581, 583, 585, 587, 589, 601, 606, 609, 611, 613, 622, 624, 626, 628, 630, 633, 637, 639, 641, 643, 645, 649, 652, 657, 659, 670, 672, 677, 679, 681, 683, 686, 689, 693, 695, 697, 699, 701, 703, 704, 710, 713, 716, 718, 720, 722, 724, 728, 730, 732, 736, 739, 750, 758, 762, 764, 766, 770, 772, 776, 778, 780, 782, 784, 786, 788, 790, 792, 794, 800, 802, 804, 806, 814, 818, 820, 822, 824, 826, 828, 830, 831, 833, 835, 837, 838, 847, 855, 858, 860, 862, 864, 866, 868, 875, 877, 879, 881, 883, 884, 895, 899, 903, 905, 907, 909, 911, 917, 919, 921, 923, 925, 927, 928, 930, 934, 936, 938, 940, 942, 946, 948, 950, 954, 956, 965, 967, 972, 976, 982, 984, 986, 994, 996, 1002, 1004, 1006, 1008, 1009, 1011, 1017, 1019, 1021, 1024, 1026, 1029, 1032, 1034, 1036, 1038, 1040, 1042, 1044, 1047, 1049, 1052, 1054, 1057, 1060, 1063, 1065, 1067, 1070, 1072, 1074, 1076, 1078, 1081, 1083, 1085, 1087, 1089, 1091, 1095, 1097, 1099, 1101, 1103, 1105, 1107, 1109, 1111, 1115, 1120, 1122, 1124, 1126, 1127, 1128, 1139, 1141, 1143, 1145, 1147, 1149, 1155, 1163, 1165, 1167, 1169, 1171, 1173, 1176, 1178, 1180, 1183, 1185, 1187, 1190, 1192, 1194, 1196, 1198, 1200, 1202, 1204, 1206, 1208, 1211, 1213, 1217, 1220, 1224, 1227, 1229, 1233, 1235, 1237, 1239, 1241, 1243, 1245, 1247, 1249, 1251, 1253, 1255, 1257, 1259, 1260, 1261, 1263, 1266, 1268, 1270, 1272, 1275, 1278, 1280, 1282, 1284, 1289, 1291, 1295, 1297, 1299, 1301, 1303, 1312, 1314, 1316, 1318, 1320, 1322, 1328, 1330, 1332, 1335, 1337, 1339, 1341, 1344, 1346, 1348, 1352, 1355, 1357, 1359 or 1362, or a fragment thereof. A plant produced from the plant cell has a difference in drought or heat tolerance as compared to a control plant that does not comprise the exogenous nucleic acid. A transgenic plant comprising such a plant cell is also provided.

[0019] Transgenic plants of any aspect provided herein can be a member of a species selected from the group consisting of Panicum virgatum (switchgrass), Sorghum bicolor (sorghum, sudangrass), Miscanthus giganteus (miscanthus), Saccharum sp. (energycane), Populus balsamifera (poplar), Zea mays (corn), Glycine max (soybean), Brassica napus (canola), Triticum aestivum (wheat), Gossypium hirsutum (cotton), Oryza sativa (rice), Helianthus annuus (sunflower), Medicago sativa (alfalfa), Beta vulgaris (sugarbeet), or Pennisetum glaucum (pearl millet).

[0020] Isolated nucleic acids are also provided. In one aspect, an isolated nucleic acid comprises a nucleotide sequence having 80% or greater sequence identity to the nucleotide sequence set forth in SEQ ID NO: 1, 12, 14, 16, 18, 20, 22, 24, 26, 28, 30, 32, 34, 36, 38, 40, 42, 44, 46, 48, 50, 52, 54, 56, 58, 59, 61, 72, 75, 77, 79, 81, 83, 85, 87, 89, 91, 93, 95, 97, 99, 101, 103, 105, 107, 109, 111, 113, 115, 117, 119, 121, 123, 125, 128, 129, 131, 133, 135, 137, 140, 141, 143, 145, 147, 149, 151, 153, 155, 157, 159, 161, 163, 165, 167, 169, 171, 173, 175, 177, 181, 183, 185, 187, 189, 191, 193, 195, 197, 199, 201, 203, 205, 207, 210, 211, 213, 215, 217, 219, 221, 223, 226, 227, 230, 232, 236, 238, 241, 243, 245, 247, 249, 251, 255, 257, 259, 261, 263, 265, 267, 270, 272, 274, 276, 278, 281, 283, 285, 287, 306, 308, 310, 313, 318, 324, 328, 331, 333, 342, 345, 347, 352, 354, 357, 359, 361, 363, 365, 367, 372, 374, 376, 378, 380, 382, 384, 386, 388, 391, 393, 395, 397, 399, 403, 406, 409, 411, 415, 417, 425, 427, 429, 437, 439, 441, 444, 446, 448, 450, 452, 454, 456, 458, 460, 462, 464, 466, 468, 471, 473, 475, 477, 479, 482, 484, 486, 488, 493, 495, 497, 499, 501, 503, 505, 507, 509, 511, 513, 517, 521, 523, 525, 527, 529, 532, 534, 537, 539, 542, 544, 546, 549, 551, 554, 556, 560, 563, 565, 567, 571, 573, 575, 577, 579, 581, 583, 585, 587, 589, 601, 606, 609, 611, 613, 622, 624, 626, 628, 630, 633, 637, 639, 641, 643, 645, 649, 652, 657, 659, 670, 672, 677, 679, 681, 683, 686, 689, 693, 695, 697, 699, 701, 703, 704, 710, 713, 716, 718, 720, 722, 724, 728, 730, 732, 736, 739, 750, 758, 762, 764, 766, 770, 772, 776, 778, 780, 782, 784, 786, 788, 790, 792, 794, 800, 802, 804, 806, 814, 818, 820, 822, 824, 826, 828, 830, 831, 833, 835, 837, 838, 847, 855, 858, 860, 862, 864, 866, 868, 875, 877, 879, 881, 883, 884, 895, 899, 903, 905, 907, 909, 911, 917, 919, 921, 923, 925, 927, 928, 930, 934, 936, 938, 940, 942, 946, 948, 950, 954, 956, 965, 967, 972, 976, 982, 984, 986, 994, 996, 1002, 1004, 1006, 1008, 1009, 1011, 1017, 1019, 1021, 1024, 1026, 1029, 1032, 1034, 1036, 1038, 1040, 1042, 1044, 1047, 1049, 1052, 1054, 1057, 1060, 1063, 1065, 1067, 1070, 1072, 1074, 1076, 1078, 1081, 1083, 1085, 1087, 1089, 1091, 1095, 1097, 1099, 1101, 1103, 1105, 1107, 1109, 1111, 1115, 1120, 1122, 1124, 1126, 1127, 1128, 1139, 1141, 1143, 1145, 1147, 1149, 1155, 1163, 1165, 1167, 1169, 1171, 1173, 1176, 1178, 1180, 1183, 1185, 1187, 1190, 1192, 1194, 1196, 1198, 1200, 1202, 1204, 1206, 1208, 1211, 1213, 1217, 1220, 1224, 1227, 1229, 1233, 1235, 1237, 1239, 1241, 1243, 1245, 1247, 1249, 1251, 1253, 1255, 1257, 1259, 1260, 1261, 1263, 1266, 1268, 1270, 1272, 1275, 1278, 1280, 1282, 1284, 1289, 1291, 1295, 1297, 1299, 1301, 1303, 1312, 1314, 1316, 1318, 1320, 1322, 1328, 1330, 1332, 1335, 1337, 1339, 1341, 1344, 1346, 1348, 1352, 1355, 1357, 1359 or 1362, or a fragment thereof.

[0021] In another aspect, an isolated nucleic acid comprises a nucleotide sequence encoding a polypeptide having 80% or greater sequence identity to the amino acid sequence set forth in SEQ ID NO: 2, 3, 4, 5, 6, 7, 8, 9, 10, 11, 13, 15, 17, 19, 21, 23, 25, 27, 29, 31, 33, 35, 37, 39, 41, 43, 45, 47, 49, 51, 53, 55, 57, 60, 62, 63, 64, 65, 66, 67, 68, 69, 70, 71, 73, 74, 76, 78, 80, 82, 84, 86, 88, 90, 92, 94, 96, 98, 100, 102, 104, 106, 108, 110, 112, 114, 116, 118, 120, 122, 124, 126, 127, 130, 132, 134, 136, 138, 139, 142, 144, 146, 148, 150, 152, 154, 156, 158, 160, 162, 164, 166, 168, 170, 172, 174, 176, 178, 179, 180, 182, 184, 186, 188, 190, 192, 194, 196, 198, 200, 202, 204, 206, 208, 209, 212, 214, 216, 218, 220, 222, 224, 225, 228, 229, 231, 233, 234, 235, 237, 239, 240, 242, 244, 246, 248, 250, 252, 253, 254, 256, 258, 260, 262, 264, 266, 268, 269, 271, 273, 275, 277, 279, 280, 282, 284, 286, 288, 289, 290, 291, 292, 293, 294, 295, 296, 297, 298, 299, 300, 301, 302, 303, 304, 305, 307, 309, 311, 312, 314, 315, 316, 317, 319, 320, 321, 322, 323, 325, 326, 327, 329, 330, 332, 334, 335, 336, 337, 338, 339, 340, 341, 343, 344, 346, 348, 349, 350, 351, 353, 355, 356, 358, 360, 362, 364, 366, 368, 369, 370, 371, 373, 375, 377, 379, 381, 383, 385, 387, 389, 390, 392, 394, 396, 398, 400, 401, 402, 404, 405, 407, 408, 410, 412, 413, 414, 416, 418, 419, 420, 421, 422, 423, 424, 426, 428, 430, 431, 432, 433, 434, 435, 436, 438, 440, 442, 443, 445, 447, 449, 451, 453, 455, 457, 459, 461, 463, 465, 467, 469, 470, 472, 474, 476, 478, 480, 481, 483, 485, 487, 489, 490, 491, 492, 494, 496, 498, 500, 502, 504, 506, 508, 510, 512, 514, 515, 516, 518, 519, 520, 522, 524, 526, 528, 530, 531, 533, 535, 536, 538, 540, 541, 543, 545, 547, 548, 550, 552, 553, 555, 557, 558, 559, 561, 562, 564, 566, 568, 569, 570, 572, 574, 576, 578, 580, 582, 584, 586, 588, 590, 591, 592, 593, 594, 595, 596, 597, 598, 599, 600, 602, 603, 604, 605, 607, 608, 610, 612, 614, 615, 616, 617, 618, 619, 620, 621, 623, 625, 627, 629, 631, 632, 634, 635, 636, 638, 640, 642, 644, 646, 647, 648, 650, 651, 653, 654, 655, 656, 658, 660, 661, 662, 663, 664, 665, 666, 667, 668, 669, 671, 673, 674, 675, 676, 678, 680, 682, 684, 685, 687, 688, 690, 691, 692, 694, 696, 698, 700, 702, 705, 706, 707, 708, 709, 711, 712, 714, 715, 717, 719, 721, 723, 725, 726, 727, 729, 731, 733, 734, 735, 737, 738, 740, 741, 742, 743, 744, 745, 746, 747, 748, 749, 751, 752, 753, 754, 755, 756, 757, 759, 760, 761, 763, 765, 767, 768, 769, 771, 773, 774, 775, 777, 779, 781, 783, 785, 787, 789, 791, 793, 795, 796, 797, 798, 799, 801, 803, 805, 807, 808, 809, 810, 811, 812, 813, 815, 816, 817, 819, 821, 823, 825, 827, 829, 832, 834, 836, 839, 840, 841, 842, 843, 844, 845, 846, 848, 849, 850, 851, 852, 853, 854, 856, 857, 859, 861, 863, 865, 867, 869, 870, 871, 872, 873, 874, 876, 878, 880, 882, 885, 886, 887, 888, 889, 890, 891, 892, 893, 894, 896, 897, 898, 900, 901, 902, 904, 906, 908, 910, 912, 913, 914, 915, 916, 918, 920, 922, 924, 926, 929, 931, 932, 933, 935, 937, 939, 941, 943, 944, 945, 947, 949, 951, 952, 953, 955, 957, 958, 959, 960, 961, 962, 963, 964, 966, 968, 969, 970, 971, 973, 974, 975, 977, 978, 979, 980, 981, 983, 985, 987, 988, 989, 990, 991, 992, 993, 995, 997, 998, 999, 1000, 1001, 1003, 1005, 1007, 1010, 1012, 1013, 1014, 1015, 1016, 1018, 1020, 1022, 1023, 1025, 1027, 1028, 1030, 1031, 1033, 1035, 1037, 1039, 1041, 1043, 1045, 1046, 1048, 1050, 1051, 1053, 1055, 1056, 1058, 1059, 1061, 1062, 1064, 1066, 1068, 1069, 1071, 1073, 1075, 1077, 1079, 1080, 1082, 1084, 1086, 1088, 1090, 1092, 1093, 1094, 1096, 1098, 1100, 1102, 1104, 1106, 1108, 1110, 1112, 1113, 1114, 1116, 1117, 1118, 1119, 1121, 1123, 1125, 1129, 1130, 1131, 1132, 1133, 1134, 1135, 1136, 1137, 1138, 1140, 1142, 1144, 1146, 1148, 1150, 1151, 1152, 1153, 1154, 1156, 1157, 1158, 1159, 1160, 1161, 1162, 1164, 1166, 1168, 1170, 1172, 1174, 1175, 1177, 1179, 1181, 1182, 1184, 1186, 1188, 1189, 1191, 1193, 1195, 1197, 1199, 1201, 1203, 1205, 1207, 1209, 1210, 1212, 1214, 1215, 1216, 1218, 1219, 1221, 1222, 1223, 1225, 1226, 1228, 1230, 1231, 1232, 1234, 1236, 1238, 1240, 1242, 1244, 1246, 1248, 1250, 1252, 1254, 1256, 1258, 1262, 1264, 1265, 1267, 1269, 1271, 1273, 1274, 1276, 1277, 1279, 1281, 1283, 1285, 1286, 1287, 1288, 1290, 1292, 1293, 1294, 1296, 1298, 1300, 1302, 1304, or 1311, 1313, 1315, 1317, 1319, 1321, 1323, 1324, 1325, 1326, 1327, 1329, 1331, 1333, 1334, 1336, 1338, 1340, 1342, 1343, 1345, 1347, 1349, 1350, 1351, 1353, 1354, 1356, 1358, 1360, or 1361.

[0022] In another aspect, methods of identifying a genetic polymorphism associated with variation in drought tolerance or heat tolerance are provided. The methods include providing a population of plants, and determining whether one or more genetic polymorphisms in the population are genetically linked to the locus for a polypeptide selected from the group consisting of the polypeptides depicted in FIGS. 1-16 and functional homologs thereof. The correlation between variation in drought tolerance or heat tolerance in plants of the population and the presence of the one or more genetic polymorphisms in plants of the population is measured, thereby permitting identification of whether or not the one or more genetic polymorphisms are associated with such variation. The population can be a population of switchgrass, sorghum, sugar cane, or miscanthus plants.

[0023] In another aspect, methods of making a plant line are provided. The methods include determining whether one or more genetic polymorphisms in a population of plants is associated with the locus for a polypeptide selected from the group consisting of the polypeptides depicted in FIGS. 1-16 and functional homologs thereof; identifying one or more plants in said population in which the presence of at least one allele at the one or more genetic polymorphisms is associated with variation in drought tolerance or heat tolerance; crossing each of the one or more identified plants with itself or a different plant to produce seed; crossing at least one progeny plant grown from the seed with itself or a different plant; and repeating the crossing steps for an additional 0-5 generations to make the plant line, where at least one allele is present in the plant line. The population can be a population of switchgrass, sorghum, sugar cane, or miscanthus plants.

[0024] Unless otherwise defined, all technical and scientific terms used herein have the same meaning as commonly understood by one of ordinary skill in the art to which this invention pertains. Although methods and materials similar or equivalent to those described herein can be used to practice the invention, suitable methods and materials are described below. All publications, patent applications, patents, and other references mentioned herein are incorporated by reference in their entirety. In case of conflict, the present specification, including definitions, will control. In addition, the materials, methods, and examples are illustrative only and not intended to be limiting.

[0025] The details of one or more embodiments of the invention are set forth in the accompanying drawings and the description below. Other features, objects, and advantages of the invention will be apparent from the description and drawings, and from the claims. The word “comprising” in the claims may be replaced by “consisting essentially of or by “consisting of,” according to standard practice in patent law.

### DESCRIPTION OF THE DRAWINGS

[0026] FIG. 1 is an alignment of Ceres SEEDLINE ID no. ME00029 (SEQ ID NO:442) with homologous and/or orthologous sequences, including, Public GI ID no. 72384401 (SEQ ID NO:443), Ceres CLONE ID no. 1079382 (SEQ ID NO:445), Ceres CLONE ID no. 1853461 (SEQ ID NO:447), Ceres CLONE ID no. 1626485 (SEQ ID NO:451), Ceres CLONE ID no. 1713920 (SEQ ID NO:459), Ceres CLONE ID no. 1772747 (SEQ ID NO:463), Ceres CLONE ID no. 225960 (SEQ ID NO:465), Public GI ID no. 115443807 (SEQ ID NO:470), and Ceres CLONE ID no. 569388 (SEQ ID NO:483). In all the alignment figures shown herein, a dash in an aligned sequence represents a gap, i.e., a lack of an amino acid at that position. Identical amino acids or conserved amino acid substitutions among aligned sequences are identified by boxes. FIG. 1 and the other alignment figures provided herein were generated using the program MUSCLE version 3.52.

[0027] FIG. 2 is an alignment of Ceres SEEDLINE ID no. ME00045 (SEQ ID NO:489) with homologous and/or orthologous sequences, including, Ceres CLONE ID no. 571200 (SEQ ID NO:494), Ceres CLONE ID no. 1928532 (SEQ ID NO:496), Ceres ANNOT ID no. 1490637 (SEQ ID NO:498), Ceres CLONE ID no. 295496 (SEQ ID NO:514), Public GI ID no. 115463637 (SEQ ID NO:515), and Ceres CLONE ID no. 1999444 (SEQ ID NO:518).

[0028] FIG. 3 is an alignment of Ceres SEEDLINE ID no. ME02190 (SEQ ID NO:568) with homologous and/or orthologous sequences, including, Ceres CLONE ID no. 695006 (SEQ ID NO:578) and Ceres ANNOT ID no. 1527488 (SEQ ID NO:584).

[0029] FIG. 4 is an alignment of Ceres SEEDLINE ID no. ME02549 (SEQ ID NO:590) with homologous and/or orthologous sequences, including, Ceres ANNOT ID no. 1501305 (SEQ ID NO:623), Ceres CLONE ID no. 607280 (SEQ ID NO:627), Public GI ID no. 92887174 (SEQ ID NO:632), Ceres CLONE ID no. 1857162 (SEQ ID NO:634), Public GI ID no. 115477272 (SEQ ID NO:674), and Ceres CLONE ID no. 264002 (SEQ ID NO:682).

[0030] FIG. 5 is an alignment of Ceres SEEDLINE ID no. ME02865 (SEQ ID NO:705) with homologous and/or orthologous sequences, including, Public GI ID no. 79320952 (SEQ ID NO:706) and Public GI ID no. 79320957 (SEQ ID NO:707).

[0031] FIG. 6 is an alignment of Ceres SEEDLINE ID no. ME03227 (SEQ ID NO:711) with homologous and/or orthologous sequences, including, Ceres CLONE ID no. 964616 (SEQ ID NO:714), Ceres CLONE ID no. 100009667 (SEQ ID NO:715), Ceres ANNOT ID no. 1444568 (SEQ ID NO:719), Ceres CLONE ID no. 719489 (SEQ ID NO:725), Ceres CLONE ID no. 587748 (SEQ ID NO:733), Public GI ID no. 125528114 (SEQ ID NO:734), and Ceres CLONE ID no. 274172 (SEQ ID NO:737).

[0032] FIG. 7 is an alignment of Ceres SEEDLINE ID no. ME04477 (SEQ ID NO:742) with homologous and/or orthologous sequences, including, Ceres CLONE ID no. 1620215 (SEQ ID NO: 759); Public GI ID no. 38016527 (SEQ ID NO: 796); Ceres CLONE ID no. 1798756 (SEQ ID NO: 763); Public GI ID no. 75133829 (SEQ ID NO: 799); Ceres ANNOT ID no. 1460527 (SEQ ID NO: 801); Public GI ID no. 119720772 (SEQ ID NO: 857); Ceres CLONE ID no. 708446 (SEQ ID NO: 859); Public GI ID no. 92896423 (SEQ ID NO: 892); Ceres CLONE ID no. 1387149 (SEQ ID NO: 912); Public GI ID no. 5031281 (SEQ ID NO: 953); Ceres CLONE ID no. 1775820 (SEQ ID NO: 955); Public GI ID no. 35187687 (SEQ ID NO: 988); Public GI ID no. 115468934 (SEQ ID NO: 991); Public GI ID no. 118424243 (SEQ ID NO: 1000); Ceres ANNOT ID no. 6063957 (SEQ ID NO: 1010); CeresClone: 1030374 (SEQ ID NO: 1306); Public GI ID no. 113196593 (SEQ ID NO: 798); Public GI ID no. 112819496 (SEQ ID NO: 999), and Public GI ID no. 169363 (SEQ ID NO: 1215).

[0033] FIG. 8 is an alignment of Ceres SEEDLINE ID no. ME18396 (SEQ ID NO:1012) with homologous and/or orthologous sequences, including, Ceres CLONE ID no. 287430 (SEQ ID NO:1018), Ceres ANNOT ID no. 451889 (SEQ ID NO:1020), Ceres CLONE ID no. 936084 (SEQ ID NO:1055), Ceres CLONE ID no. 1792501 (SEQ ID NO:1066), Ceres ANNOT ID no. 1437875 (SEQ ID NO:1068), Public GI ID no. 1853968 (SEQ ID NO:1093), Public GI ID no. 27530032 (SEQ ID NO:1094), Ceres CLONE ID no. 1834483 (SEQ ID NO:1110), Public GI ID no. 84579418 (SEQ ID NO:1113), Public GI ID no. 15077030 (SEQ ID NO:1117), and Public GI ID no. 13752458 (SEQ ID NO:1118).

[0034] FIG. 9 is an alignment of Ceres SEEDLINE ID no. ME20095 (SEQ ID NO:1129) with homologous and/or orthologous sequences, including, Public GI ID no. 72255610 (SEQ ID NO:933), Ceres CLONE ID no. 1927040 (SEQ ID NO:926), Ceres CLONE ID no. 1562633 (SEQ ID NO:1140), Ceres ANNOT ID no. 1692728 (SEQ ID NO:1142), Ceres CLONE ID no. 921110 (SEQ ID NO:1144), Ceres CLONE ID no. 1791180 (SEQ ID NO:1146), Ceres CLONE ID no. 527891 (SEQ ID NO:1148), Ceres ANNOT ID no. 1522414 (SEQ ID NO:1150), and Public GI ID no. 51458330 (SEQ ID NO:1182).

[0035] FIG. 10 is an alignment of Ceres CLONE ID no. 31309 (SEQ ID NO:60) with homologous and/or orthologous sequences, including, Ceres CLONE ID no. 872030 (SEQ ID NO:62), Ceres CLONE ID no. 100029223 (SEQ ID NO:74), Ceres CLONE ID no. 1939845 (SEQ ID NO:98), Ceres CLONE ID no. 2015383 (SEQ ID NO:102), Ceres CLONE ID no. 1607893 (SEQ ID NO:104), Ceres CLONE ID no. 1075133 (SEQ ID NO:152), and Ceres CLONE ID no. 1218065 (SEQ ID NO:915).

[0036] FIG. 11 is an alignment of Ceres LOCUS ID no.At2g26150 (SEQ ID NO:364) with homologous and/or orthologous sequences, including, Ceres ANNOT ID no. 1455221 (SEQ ID NO:407), Public GI ID no. 729774 (SEQ ID NO:408), Ceres CLONE ID no. 1414288 (SEQ ID NO:410), Public GI ID no. 115482048 (SEQ ID NO:413), and Public GI ID no. 56117815 (SEQ ID NO:421).

[0037] FIG. 12 is an alignment of Ceres LOCUS ID no.At1g32330 (SEQ ID NO:311) with homologous and/or orthologous sequences, including, Ceres ANNOT ID no. 1538958 (SEQ ID NO:319), Public GI ID no. 115521213 (SEQ ID NO:320), Public GI ID no. 42415865 (SEQ ID NO:321), Public GI ID no. 729775 (SEQ ID NO:322), Public GI ID no. 11386827 (SEQ ID NO:323), Public GI ID no. 115456675 (SEQ ID NO:326), and Public GI ID no. 89274218 (SEQ ID NO:335).

[0038] FIG. 13 is an alignment of Ceres CLONE ID no. 41543 (SEQ ID NO:160) with homologous and/or orthologous sequences, including, Ceres CLONE ID no. 1837065 (SEQ ID NO:162), Ceres ANNOT ID no. 1531178 (SEQ ID NO:184), Ceres CLONE ID no. 470694 (SEQ ID NO:242), Public GI ID no. 92867368 (SEQ ID NO:253), Ceres CLONE ID no. 859707 (SEQ ID NO:256), Ceres CLONE ID no. 392275 (SEQ ID NO:268), Ceres CLONE ID no. 1828394 (SEQ ID NO:282), and Public GI ID no. 115466694 (SEQ ID NO:294).

[0039] FIG. 14 is an alignment of Ceres CLONE ID no. 14572 (SEQ ID NO:2) with homologous and/or orthologous sequences, including, Public GI ID no. 115470807 (SEQ ID NO:5), Ceres CLONE ID no. 1842931 (SEQ ID NO:15), Ceres CLONE ID no. 321308 (SEQ ID NO:17), Ceres CLONE ID no. 1725811 (SEQ ID NO:19), Ceres CLONE ID no. 1357455 (SEQ ID NO:21), Ceres CLONE ID no. 943370 (SEQ ID NO:23), Ceres CLONE ID no. 1327712 (SEQ ID NO:25), Ceres CLONE ID no. 1764692 (SEQ ID NO:27), and Ceres ANNOT ID no. 1512656 (SEQ ID NO:41).

[0040] FIG. 15 is an alignment of Ceres SEEDLINE ID no. ME02401 (SEQ ID NO:749) with homologous and/or orthologous sequences, including, Ceres CLONE ID no. 1847516 (SEQ ID NO:1195), Ceres CLONE ID no. 1961986 (SEQ ID NO:1201), and Ceres ANNOT ID no. 6091930 (SEQ ID NO:1207).

[0041] FIG. 16 is an alignment of Ceres SEEDLINE ID no. ME004246 (SEQ ID NO:1311) with homologous and/or orthologous sequences, including, CeresClone: 971761 (SEQ ID NO: 1313), CeresClone: 1946574 (SEQ ID NO: 1331), CeresClone: 2055551 (SEQ ID NO: 1340), CeresClone: 100045499 (SEQ ID NO: 1347), CeresClone: 1465853 (SEQ ID NO: 1353), and CeresClone: 753982 (SEQ ID NO: 1360).

### DETAILED DESCRIPTION

[0042] The invention features methods and materials related to increasing heat and/or drought tolerance in plants. In some embodiments, the plants may have increased heat and drought tolerance. The methods can include transforming a plant cell with a nucleic acid encoding a heat and/or drought-tolerance polypeptide, wherein expression of the polypeptide results in increased heat and/or drought tolerance. Plant cells produced using such methods can be grown to produce plants having an increased heat and/or drought tolerance. Such plants, and the seeds of such plants, may be used to produce, for example, may be used to produce biomass and/or to produce crops with increased yield and/or quality.

### I. DEFINITIONS

[0043] “Amino acid” refers to one of the twenty biologically occurring amino acids and to synthetic amino acids, including D/L optical isomers.

[0044] “Cell type-preferential promoter” or “tissue-preferential promoter” refers to a promoter that drives expression preferentially in a target cell type or tissue, respectively, but may also lead to some transcription in other cell types or tissues as well.

[0045] “Control plant” refers to a plant that does not contain the exogenous nucleic acid present in a transgenic plant of interest, but otherwise has the same or similar genetic background as such a transgenic plant. A suitable control plant can be a non-transgenic wild type plant, a non-transgenic segregant from a transformation experiment, or a transgenic plant that contains an exogenous nucleic acid other than the exogenous nucleic acid of interest.

[0046] “Domains” are groups of substantially contiguous amino acids in a polypeptide that can be used to characterize protein families and/or parts of proteins. Such domains have a “fingerprint” or “signature” that can comprise conserved primary sequence, secondary structure, and/or three-dimensional conformation. Generally, domains are correlated with specific in vitro and/or in vivo activities. A domain can have a length of from 10 amino acids to 400 amino acids, e.g., 10 to 50 amino acids, or 25 to 100 amino acids, or 35 to 65 amino acids, or 35 to 55 amino acids, or 45 to 60 amino acids, or 200 to 300 amino acids, or 300 to 400 amino acids.

[0047] “Exogenous” with respect to a nucleic acid indicates that the nucleic acid is part of a recombinant nucleic acid construct, or is not in its natural environment. For example, an exogenous nucleic acid can be a sequence from one species introduced into another species, i.e., a heterologous nucleic acid. Typically, such an exogenous nucleic acid is introduced into the other species via a recombinant nucleic acid construct. An exogenous nucleic acid can also be a sequence that is native to an organism and that has been reintroduced into cells of that organism. An exogenous nucleic acid that includes a native sequence can often be distinguished from the naturally occurring sequence by the presence of non-natural sequences linked to the exogenous nucleic acid, e.g., non-native regulatory sequences flanking a native sequence in a recombinant nucleic acid construct. In addition, stably transformed exogenous nucleic acids typically are integrated at positions other than the position where the native sequence is found. It will be appreciated that an exogenous nucleic acid may have been introduced into a progenitor and not into the cell under consideration. For example, a transgenic plant containing an exogenous nucleic acid can be the progeny of a cross between a stably transformed plant and a non-transgenic plant. Such progeny are considered to contain the exogenous nucleic acid.

[0048] “Expression” refers to the process of converting genetic information of a polynucleotide into RNA through transcription, which is catalyzed by an enzyme, RNA polymerase, and into protein, through translation of mRNA on ribosomes.

[0049] “Heterologous polypeptide” as used herein refers to a polypeptide that is not a naturally occurring polypeptide in a plant cell, e.g., a transgenic Panicum virgatum plant transformed with and expressing the coding sequence for a nitrogen transporter polypeptide from a Zea mays plant.

[0050] “Isolated nucleic acid” as used herein includes a naturally-occurring nucleic acid, provided one or both of the sequences immediately flanking that nucleic acid in its naturally-occurring genome is removed or absent. Thus, an isolated nucleic acid includes, without limitation, a nucleic acid that exists as a purified molecule or a nucleic acid molecule that is incorporated into a vector or a virus. A nucleic acid existing among hundreds to millions of other nucleic acids within, for example, cDNA libraries, genomic libraries, or gel slices containing a genomic DNA restriction digest, is not to be considered an isolated nucleic acid.

[0051] “Modulation” of the level of tolerance to a stimulus (e.g., drought conditions or heat shock conditions) refers to the change in the level of tolerance of the indicated stimulus that is observed as a result of expression of, or transcription from, an exogenous nucleic acid in a plant cell. The change in level is measured relative to the corresponding level in control plants.

[0052] “Nucleic acid” and “polynucleotide” are used interchangeably herein, and refer to both RNA and DNA, including cDNA, genomic DNA, synthetic DNA, and DNA or RNA containing nucleic acid analogs. Polynucleotides can have any three-dimensional structure. A nucleic acid can be double-stranded or single-stranded (i.e., a sense strand or an antisense strand). Non-limiting examples of polynucleotides include genes, gene fragments, exons, introns, messenger RNA (mRNA), transfer RNA, ribosomal RNA, siRNA, micro-RNA, ribozymes, cDNA, recombinant polynucleotides, branched polynucleotides, nucleic acid probes and nucleic acid primers. A polynucleotide may contain unconventional or modified nucleotides.

[0053] “Operably linked” refers to the positioning of a regulatory region and a sequence to be transcribed in a nucleic acid so that the regulatory region is effective for regulating transcription or translation of the sequence. For example, to operably link a coding sequence and a regulatory region, the translation initiation site of the translational reading frame of the coding sequence is typically positioned between one and about fifty nucleotides downstream of the regulatory region. A regulatory region can, however, be positioned as much as about 5,000 nucleotides upstream of the translation initiation site, or about 2,000 nucleotides upstream of the transcription start site.

[0054] “Polypeptide” as used herein refers to a compound of two or more subunit amino acids, amino acid analogs, or other peptidomimetics, regardless of post-translational modification, e.g., phosphorylation or glycosylation. The subunits may be linked by peptide bonds or other bonds such as, for example, ester or ether bonds. Full-length polypeptides, truncated polypeptides, point mutants, insertion mutants, splice variants, chimeric proteins, and fragments thereof are encompassed by this definition.

[0055] “Progeny” includes descendants of a particular plant or plant line. Progeny of an instant plant include seeds formed on F₁, F₂, F₃, F₄, F₅, F₆ and subsequent generation plants, or seeds formed on BC₁, BC₂, BC₃, and subsequent generation plants, or seeds formed on F₁BC₁, F₁BC₂, F₁BC₃, and subsequent generation plants. The designation F₁ refers to the progeny of a cross between two parents that are genetically distinct. The designations F₂, F₃, F₄, F₅ and F₆ refer to subsequent generations of self- or sib-pollinated progeny of an F₁ plant.

[0056] “Regulatory region” refers to a nucleic acid having nucleotide sequences that influence transcription or translation initiation and rate, and stability and/or mobility of a transcription or translation product. Regulatory regions include, without limitation, promoter sequences, enhancer sequences, response elements, protein recognition sites, inducible elements, protein binding sequences, 5′ and 3′ untranslated regions (UTRs), transcriptional start sites, termination sequences, polyadenylation sequences, introns, and combinations thereof. A regulatory region typically comprises at least a core (basal) promoter. A regulatory region also may include at least one control element, such as an enhancer sequence, an upstream element or an upstream activation region (UAR). For example, a suitable enhancer is a cis-regulatory element (−212 to −154) from the upstream region of the octopine synthase (ocs) gene. Fromm et al., The Plant Cell, 1:977-984 (1989).

[0057] “Up-regulation” refers to regulation that increases the level of an expression product (mRNA, polypeptide, or both) relative to basal or native states.

[0058] “Vector” refers to a replicon, such as a plasmid, phage, or cosmid, into which another DNA segment may be inserted so as to bring about the replication of the inserted segment. Generally, a vector is capable of replication when associated with the proper control elements. The term “vector” includes cloning and expression vectors, as well as viral vectors and integrating vectors. An “expression vector” is a vector that includes a regulatory region.

### II. POLYPEPTIDES

[0059] Polypeptides described herein include heat and/or drought-tolerance polypeptides. Heat and/or drought-tolerance polypeptides can be effective to increase heat and/or drought-tolerance when expressed in a plant or plant cell. Such polypeptides typically contain at least one domain indicative of heat and/or drought-tolerance polypeptides, as described in more detail herein. Heat and/or drought-tolerance polypeptides typically have an HMM bit score that is greater than 20 for an HMM model based on one of the alignments set forth in FIGS. 1-16, as described in more detail herein. In some embodiments, heat and/or drought-tolerance polypeptides have greater than 80% identity to SEQ ID NO:442, SEQ ID NO:489, SEQ ID NO:568, SEQ ID NO:590, SEQ ID NO:705, SEQ ID NO:711, SEQ ID NO:742, SEQ ID NO:1012, SEQ ID NO:1129, SEQ ID NO:60, SEQ ID NO:364, SEQ ID NO:311, SEQ ID NO:160, SEQ ID NO:2, SEQ ID NO:749, SEQ ID NO:1311, or SEQ ID NO:57, as described in more detail herein.

[0060] A. Domains Indicative of Heat and/or Drought-Tolerance Polypeptides

[0061] A drought-tolerance polypeptide can be a RNA polymerase Rpb4 family member. The eukaryotic RNA polymerase subunit RPB4 forms a heterodimer with subunit RPB7 that reversibly associates with the RNA polymerase II core. SEQ ID NO:442 sets forth the amino acid sequence of an Arabidopsis clone, identified herein as Ceres SEEDLINE ID No. ME00029 (SEQ ID NO:441), that is predicted to encode a RNA polymerase Rpb4 polypeptide.

[0062] A drought-tolerance polypeptide can contain a sulfotransferase 1 domain characteristic of polypeptides belonging to the sulfotransferase family. Members of the sulfotransferase family catalyze the transfer of sulfate groups to specific compounds. SEQ ID NO:590, which sets forth the amino acid sequence of an Arabidopsis clone, identified herein as Ceres SEEDLINE ID No. ME02549 (SEQ ID NO:589), is predicted to encode a polypeptide containing a sulfotransferase 1 domain.

[0063] A drought-tolerance polypeptide can contain an AN1-like zinc finger (zf-AN1) and an A20-like zinc finger (zf-A20) domain. The AN1-like zinc finger domain was first identified as a zinc finger at the C-terminus of An1, a ubiquitin-like protein in Xenopus laevis. The AN1-like zinc finger domain is characterized by the pattern, C-X2-C-X(9-12)-C-X(1-2)-C-X4-C-X2-H-X5-H-X-C Where X can be any amino acid, and numbers in brackets indicate the number of residues. In A20, the A20-like zinc finger domain mediates self-association and IL-1-induced NF-kappa B activation. SEQ ID NO:742, which sets forth the amino acid sequence of an Arabidopsis clone, identified herein as Ceres Clone ID No. 24255 (SEQ ID NO:1241), is predicted to encode a polypeptide containing an AN1-like zinc finger domain and a A20-like zinc finger domain. SEQ ID NO:749, which sets forth the amino acid sequence of an Arabidopsis clone, identified herein as Ceres SEEDLINE ID No. ME02401 (SEQ ID NO:1188), is also predicted to encode a polypeptide containing an AN1-like zinc finger domain and a A20-like zinc finger domain.

[0064] A drought-tolerance polypeptide can contain a short chain dehydrogenase (adh_short) domain. Most polypeptides containing a short chain dehydrogenase domain are polypeptides of about 250 to 300 amino acid residues, and are NAD- or NADP-dependent oxidoreductases. SEQ ID NO:1012, which sets forth the amino acid sequence of an Arabidopsis clone, identified herein as Ceres SEEDLINE ID No. 18396 (SEQ ID NO:1260), is predicted to encode a polypeptide containing a short chain dehydrogenase domain.

[0065] A drought-tolerance polypeptide can contain a trehalose-phosphatase (Trehalose_PPase) domain characteristic of trehalose phosphatase polypeptides. Trehalose phosphatases catalyse the de-phosphorylation of trehalose-6-phosphate to trehalose and orthophosphate. Trehalose is a common disaccharide in bacteria, fungi, and invertebrates that appears to play a role in desiccation tolerance. SEQ ID NO:1129, which sets forth the amino acid sequence of an Arabidopsis clone, identified herein as Ceres SEEDLINE ID No. ME20095 (SEQ ID NO:1126), is predicted to encode a polypeptide containing a trehalose-phosphatase domain.

[0066] A heat-tolerance polypeptide can be a synaptobrevin-related polypeptide. SEQ ID NO:160, which sets forth the amino acid sequence of an Arabidopsis clone, identified herein as Ceres CLONE ID no. 41543 (SEQ ID NO:159), is predicted to encode a synaptobrevin-related polypeptide.

[0067] A heat-tolerance polypeptide can contain an HSF-type DNA-binding domain, which is predicted to be characteristic of heat shock factor transcription activator. Heat shock factor transcription activators are often found associated with heat shock protein promoters during heat shock. SEQ ID NO:311, which sets forth the amino acid sequence of an Arabidopsis clone, identified herein as Ceres LOCUS ID no.At1g32330 (SEQ ID NO:310), is predicted to encode a polypeptide containing an HSF-type DNA-binding domain. SEQ ID NO:364, which sets forth the amino acid sequence of an Arabidopsis clone, identified herein as Ceres LOCUS ID no.At2g26150 (SEQ ID NO:363), is also predicted to encode a polypeptide containing an HSF-type DNA-binding domain.

[0068] A heat-tolerance polypeptide can contain a DnaJ domain. The prokaryotic heat shock protein DnaJ interacts with the chaperone hsp70-like DnaK protein. Structurally, the DnaJ protein consists of an N-terminal conserved domain (called ‘J’ domain) of about 70 amino acids, a glycine-rich region (‘G’ domain’) of about 30 residues, a central domain containing four repeats of a CXXCXGXG motif (‘CRR’ domain) and a C-terminal region of 120 to 170 residues. SEQ ID NO:60, which sets forth the amino acid sequence of an Arabidopsis clone, identified herein as Ceres CLONE ID no. 31309 (SEQ ID NO:58), is predicted to encode an polypeptide containing a DnaJ domain.

[0069] A drought-tolerance polypeptide can contain a KH_{—}2 domain. Most polypeptides containing a KH_{—}2 domain are typically around 70 amino acids and are present in a wide variety of quite diverse nucleic acid-binding proteins. It has been shown to bind RNA. Like many other RNA-binding motifs, KH motifs are found in one or multiple copies, each motif is necessary for in vitro RNA binding activity, suggesting that they may function cooperatively or, in the case of single KH motif proteins (for example, Mer1p), independently. According to structural analysis the KH domain can be separated in two groups. The first group or type-1 contain a beta-alpha-alpha-beta-beta-alpha structure, whereas in the type-2 the two last beta-sheet are located in the N terminal part of the domain (alpha-beta-beta-alpha-alpha-beta). Sequence similarity between these two folds are limited to a short region (VIGXXGXXI) in the RNA binding motif. This motif is located between helices 1 and 2 in type-1 and between helices 2 and 3 in type-2. SEQ ID NO:1311, which sets forth the amino acid sequence of an Arabidopsis clone, identified herein as Ceres SEEDLINE ID No. ME04246 (SEQ ID NO:1362), is predicted to encode a polypeptide containing a KH_{—}2 domain.

[0070] B. Functional Homologs Identified by Reciprocal BLAST

[0071] In some embodiments, one or more functional homologs of a reference heat and/or drought-tolerance polypeptide defined by one or more of the Pfam descriptions indicated above are suitable for use as heat and/or drought-tolerance polypeptides. A functional homolog is a polypeptide that has sequence similarity to a reference polypeptide, and that carries out one or more of the biochemical or physiological function(s) of the reference polypeptide. A functional homolog and the reference polypeptide may be natural occurring polypeptides, and the sequence similarity may be due to convergent or divergent evolutionary events. As such, functional homologs are sometimes designated in the literature as homologs, or orthologs, or paralogs. Variants of a naturally occurring functional homolog, such as polypeptides encoded by mutants of a wild type coding sequence, may themselves be functional homologs. Functional homologs can also be created via site-directed mutagenesis of the coding sequence for a heat and/or drought-tolerance polypeptide, or by combining domains from the coding sequences for different naturally-occurring heat and/or drought-tolerance polypeptides (“domain swapping”). The term “functional homolog” is sometimes applied to the nucleic acid that encodes a functionally homologous polypeptide.

[0072] Functional homologs can be identified by analysis of nucleotide and polypeptide sequence alignments. For example, performing a query on a database of nucleotide or polypeptide sequences can identify homologs of heat and/or drought-tolerance polypeptides. Sequence analysis can involve BLAST, Reciprocal BLAST, or PSI-BLAST analysis of nonredundant databases using a heat and/or drought-tolerance polypeptide amino acid sequence as the reference sequence. Amino acid sequence is, in some instances, deduced from the nucleotide sequence. Those polypeptides in the database that have greater than 40% sequence identity are candidates for further evaluation for suitability as a heat and/or drought-tolerance polypeptide. Amino acid sequence similarity allows for conservative amino acid substitutions, such as substitution of one hydrophobic residue for another or substitution of one polar residue for another. If desired, manual inspection of such candidates can be carried out in order to narrow the number of candidates to be further evaluated. Manual inspection can be performed by selecting those candidates that appear to have domains present in heat and/or drought-tolerance polypeptides, e.g., conserved functional domains.

[0073] Conserved regions can be identified by locating a region within the primary amino acid sequence of a heat and/or drought-tolerance polypeptide that is a repeated sequence, forms some secondary structure (e.g., helices and beta sheets), establishes positively or negatively charged domains, or represents a protein motif or domain. See, e.g., the Pfam web site describing consensus sequences for a variety of protein motifs and domains on the World Wide Web at sanger.ac.uk/Software/Pfam/ and pfam.janelia.org/. A description of the information included at the Pfam database is described in Sonnhammer et al., Nucl. Acids Res., 26:320-322 (1998); Sonnhammer et al., Proteins, 28:405-420 (1997); and Bateman et al., Nucl. Acids Res., 27:260-262 (1999). Conserved regions also can be determined by aligning sequences of the same or related polypeptides from closely related species. Closely related species preferably are from the same family. In some embodiments, alignment of sequences from two different species is adequate.

[0074] Typically, polypeptides that exhibit at least about 20% amino acid sequence identity are useful to identify conserved regions. Conserved regions of related polypeptides exhibit at least 45% amino acid sequence identity (e.g., at least 50%, at least 60%, at least 70%, at least 80%, or at least 90% amino acid sequence identity). In some embodiments, a conserved region exhibits at least 92%, 94%, 96%, 98%, or 99% amino acid sequence identity.

[0075] Examples of amino acid sequences of functional homologs of the polypeptide set forth in SEQ ID NO:442 are provided in FIG. 1 and in the sequence listing. Such functional homologs include Public GI ID no. 72384401 (SEQ ID NO:443), Ceres CLONE ID no. 1079382 (SEQ ID NO:445), Ceres CLONE ID no. 1853461 (SEQ ID NO:447), Ceres CLONE ID no. 1626485 (SEQ ID NO:451), Ceres CLONE ID no. 1713920 (SEQ ID NO:459), Ceres CLONE ID no. 1772747 (SEQ ID NO:463), Ceres CLONE ID no. 225960 (SEQ ID NO:465), Public GI ID no. 115443807 (SEQ ID NO:470), and Ceres CLONE ID no. 569388 (SEQ ID NO:483). Other functional homologs of SEQ ID NO:442 include Ceres CLONE ID no. 1915549 (SEQ ID NO:449), Ceres CLONE ID no. 529871 (SEQ ID NO:453), Ceres CLONE ID no. 1067079 (SEQ ID NO:455), Ceres CLONE ID no. 1079572 (SEQ ID NO:457), Ceres ANNOT ID no. 1456550 (SEQ ID NO:461), Ceres CLONE ID no. 1437889 (SEQ ID NO:469), Ceres CLONE ID no. 2014249 (SEQ ID NO:472), Ceres CLONE ID no. 2033133 (SEQ ID NO:474), Ceres CLONE ID no. 707404 (SEQ ID NO:476), Ceres CLONE ID no. 1770680 (SEQ ID NO:478), Ceres ANNOT ID no. 1450989 (SEQ ID NO:480), Public GI ID no. 72384445 (SEQ ID NO:481), Ceres CLONE ID no. 1059299 (SEQ ID NO:485), and Ceres ANNOT ID no. 6008086 (SEQ ID NO:487). In some cases, a functional homolog of SEQ ID NO:442 has an amino acid sequence with at least 40% sequence identity, e.g., 50%, 52%, 56%, 59%, 61%, 65%, 70%, 75%, 80%, 85%, 90%, 95%, 97%, 98%, or 99% sequence identity, to the amino acid sequence set forth in SEQ ID NO:442.

[0076] Examples of amino acid sequences of functional homologs of the polypeptide set forth in SEQ ID NO:489 are provided in FIG. 2 and in the sequence listing. Such functional homologs include Ceres CLONE ID no. 571200 (SEQ ID NO:494), Ceres CLONE ID no. 1928532 (SEQ ID NO:496), Ceres ANNOT ID no. 1490637 (SEQ ID NO:498), Ceres CLONE ID no. 295496 (SEQ ID NO:514), Public GI ID no. 115463637 (SEQ ID NO:515), and Ceres CLONE ID no. 1999444 (SEQ ID NO:518). Other functional homologs of SEQ ID NO:489 include Public GI ID no. 147844794 (SEQ ID NO:490), Public GI ID no. 147842279 (SEQ ID NO:491), Public GI ID no. 145355441 (SEQ ID NO:492), Ceres ANNOT ID no. 1461381 (SEQ ID NO:500), Ceres ANNOT ID no. 1440313 (SEQ ID NO:502), Ceres ANNOT ID no. 1448275 (SEQ ID NO:504), Ceres ANNOT ID no. 1437838 (SEQ ID NO:506), Ceres ANNOT ID no. 1501275 (SEQ ID NO:508), Ceres CLONE ID no. 1644562 (SEQ ID NO:510), Ceres CLONE ID no. 1925967 (SEQ ID NO:512), Public GI ID no. 115435904 (SEQ ID NO:516), Public GI ID no. 125552168 (SEQ ID NO:519), Public GI ID no. 125594093 (SEQ ID NO:520), Ceres CLONE ID no. 221188 (SEQ ID NO:522), Ceres ANNOT ID no. 1477714 (SEQ ID NO:524), Ceres CLONE ID no. 1787953 (SEQ ID NO:526), Ceres ANNOT ID no. 1531210 (SEQ ID NO:528), Ceres CLONE ID no. 521176 (SEQ ID NO:530), Public GI ID no. 22327055 (SEQ ID NO:531), Ceres ANNOT ID no. 1508824 (SEQ ID NO:533), Ceres CLONE ID no. 38879 (SEQ ID NO:535), Public GI ID no. 42569309 (SEQ ID NO:536), Ceres CLONE ID no. 1817784 (SEQ ID NO:538), Ceres CLONE ID no. 284637 (SEQ ID NO:540), Public GI ID no. 125596251 (SEQ ID NO:541), Public GI ID no. 125554300 (SEQ ID NO:543), Ceres CLONE ID no. 1935437 (SEQ ID NO:545), Ceres ANNOT ID no. 1455622 (SEQ ID NO:547), Public GI ID no. 55771354 (SEQ ID NO:548), Ceres ANNOT ID no. 1514655 (SEQ ID NO:550), Ceres CLONE ID no. 1848736 (SEQ ID NO:552), Public GI ID no. 125569872 (SEQ ID NO:553), Ceres CLONE ID no. 1645078 (SEQ ID NO:555), Ceres CLONE ID no. 1790573 (SEQ ID NO:557), Public GI ID no. 4567251 (SEQ ID NO:558), Ceres CLONE ID no. 444113 (SEQ ID NO:561), Public GI ID no. 125525355 (SEQ ID NO:562), Ceres ANNOT ID no. 6028854 (SEQ ID NO:564), and Ceres ANNOT ID no. 6115356 (SEQ ID NO:566). In some cases, a functional homolog of SEQ ID NO:489 has an amino acid sequence with at least 40% sequence identity, e.g., 50%, 52%, 56%, 59%, 61%, 65%, 70%, 75%, 80%, 85%, 90%, 95%, 97%, 98%, or 99% sequence identity, to the amino acid sequence set forth in SEQ ID NO:489.

[0077] Examples of amino acid sequences of functional homologs of the polypeptide set forth in SEQ ID NO:568 are provided in FIG. 3 and in the sequence listing. Such functional homologs include Ceres CLONE ID no. 695006 (SEQ ID NO:578) and Ceres ANNOT ID no. 1527488 (SEQ ID NO:584). Other functional homologs of SEQ ID NO:568 include Public GI ID no. 79318519 (SEQ ID NO:569), Public GI ID no. 79318537 (SEQ ID NO:570), Ceres CLONE ID no. 956998 (SEQ ID NO:572), Ceres CLONE ID no. 978154 (SEQ ID NO:574), Ceres CLONE ID no. 1035628 (SEQ ID NO:576), Ceres CLONE ID no. 464169 (SEQ ID NO:580), Ceres ANNOT ID no. 1474075 (SEQ ID NO:582), Ceres ANNOT ID no. 1474073 (SEQ ID NO:586), and Ceres ANNOT ID no. 1527486 (SEQ ID NO:588). In some cases, a functional homolog of SEQ ID NO:568 has an amino acid sequence with at least 40% sequence identity, e.g., 50%, 52%, 56%, 59%, 61%, 65%, 70%, 75%, 80%, 85%, 90%, 95%, 97%, 98%, or 99% sequence identity, to the amino acid sequence set forth in SEQ ID NO:568.

[0078] Examples of amino acid sequences of functional homologs of the polypeptide set forth in SEQ ID NO:590 are provided in FIG. 4 and in the sequence listing. Such functional homologs include Ceres ANNOT ID no. 1501305 (SEQ ID NO:623), Ceres CLONE ID no. 607280 (SEQ ID NO:627), Public GI ID no. 92887174 (SEQ ID NO:632), Ceres CLONE ID no. 1857162 (SEQ ID NO:634), Public GI ID no. 115477272 (SEQ ID NO:674), and Ceres CLONE ID no. 264002 (SEQ ID NO:682). Other functional homologs of SEQ ID NO:590 include Public GI ID no. 147822456 (SEQ ID NO:591), Public GI ID no. 144923935 (SEQ ID NO:592), Public GI ID no. 140038730 (SEQ ID NO:593), Public GI ID no. 78708014 (SEQ ID NO:594), Public GI ID no. 115481362 (SEQ ID NO:595), Public GI ID no. 125531350 (SEQ ID NO:596), Public GI ID no. 125525598 (SEQ ID NO:597), Public GI ID no. 77548630 (SEQ ID NO:598), Public GI ID no. 46798895 (SEQ ID NO:599), Public GI ID no. 125564653 (SEQ ID NO:600), Ceres CLONE ID no. 998865 (SEQ ID NO:602), Public GI ID no. 125556140 (SEQ ID NO:603), Public GI ID no. 125534482 (SEQ ID NO:604), Public GI ID no. 125550135 (SEQ ID NO:605), Ceres CLONE ID no. 639816 (SEQ ID NO:607), Public GI ID no. 125562170 (SEQ ID NO:608), Ceres CLONE ID no. 1797059 (SEQ ID NO:610), Ceres CLONE ID no. 1031510 (SEQ ID NO:612), Ceres CLONE ID no. 1973081 (SEQ ID NO:614), Public GI ID no. 125561002 (SEQ ID NO:615), Public GI ID no. 125541732 (SEQ ID NO:616), Public GI ID no. 125560677 (SEQ ID NO:617), Public GI ID no. 125559115 (SEQ ID NO:618), Public GI ID no. 15809903 (SEQ ID NO:619), Public GI ID no. 30681703 (SEQ ID NO:620), Public GI ID no. 9759556 (SEQ ID NO:621), Ceres ANNOT ID no. 1448303 (SEQ ID NO:625), Ceres ANNOT ID no. 1448305 (SEQ ID NO:629), Ceres ANNOT ID no. 1448307 (SEQ ID NO:631), Public GI ID no. 92888243 (SEQ ID NO:635), Public GI ID no. 92879395 (SEQ ID NO:636), Ceres CLONE ID no. 528876 (SEQ ID NO:638), Ceres ANNOT ID no. 1448352 (SEQ ID NO:640), Ceres ANNOT ID no. 1437745 (SEQ ID NO:642), Ceres ANNOT ID no. 1464146 (SEQ ID NO:644), Ceres ANNOT ID no. 1437744 (SEQ ID NO:646), Public GI ID no. 92894684 (SEQ ID NO:647), Ceres CLONE ID no. 3964 (SEQ ID NO:650), Public GI ID no. 13272389 (SEQ ID NO:651), Ceres ANNOT ID no. 1481203 (SEQ ID NO:653), Public GI ID no. 15227699 (SEQ ID NO:654), Public GI ID no. 92886084 (SEQ ID NO:655), Public GI ID no. 15239947 (SEQ ID NO:656), Ceres CLONE ID no. 34878 (SEQ ID NO:658), Ceres CLONE ID no. 150484 (SEQ ID NO:660), Public GI ID no. 21553545 (SEQ ID NO:661), Public GI ID no. 15222843 (SEQ ID NO:662), Public GI ID no. 38230552 (SEQ ID NO:663), Public GI ID no. 3420008 (SEQ ID NO:664), Public GI ID no. 15230602 (SEQ ID NO:665), Public GI ID no. 3420004 (SEQ ID NO:666), Public GI ID no. 2129586 (SEQ ID NO:667), Public GI ID no. 15217849 (SEQ ID NO:668), Public GI ID no. 15227704 (SEQ ID NO:669), Ceres ANNOT ID no. 1465750 (SEQ ID NO:671), Ceres CLONE ID no. 1983975 (SEQ ID NO:673), Public GI ID no. 15226028 (SEQ ID NO:675), Public GI ID no. 115459524 (SEQ ID NO:676), Ceres CLONE ID no. 1793353 (SEQ ID NO:678), Ceres ANNOT ID no. 1467399 (SEQ ID NO:680), Ceres CLONE ID no. 1982930 (SEQ ID NO:684), Public GI ID no. 125540700 (SEQ ID NO:685), Ceres ANNOT ID no. 1448743 (SEQ ID NO:687), Public GI ID no. 50251910 (SEQ ID NO:688), Ceres CLONE ID no. 1836748 (SEQ ID NO:690), Public GI ID no. 3420006 (SEQ ID NO:691), Public GI ID no. 92879376 (SEQ ID NO:692), Ceres CLONE ID no. 838941 (SEQ ID NO:694), Ceres ANNOT ID no. 1437746 (SEQ ID NO:696), Ceres ANNOT ID no. 6017241 (SEQ ID NO:698), Ceres ANNOT ID no. 6085947 (SEQ ID NO:700), and Ceres ANNOT ID no. 6017242 (SEQ ID NO:702). In some cases, a functional homolog of SEQ ID NO:590 has an amino acid sequence with at least 40% sequence identity, e.g., 50%, 52%, 56%, 59%, 61%, 65%, 70%, 75%, 80%, 85%, 90%, 95%, 97%, 98%, or 99% sequence identity, to the amino acid sequence set forth in SEQ ID NO:590.

[0079] Examples of amino acid sequences of functional homologs of the polypeptide set forth in SEQ ID NO:705 are provided in FIG. 5 and in the sequence listing. Such functional homologs include Public GI ID no. 79320952 (SEQ ID NO:706) and Public GI ID no. 79320957 (SEQ ID NO:707). Other functional homologs of SEQ ID NO:705 include Public GI ID no. 6692094 (SEQ ID NO:708) and Public GI ID no. 145323049 (SEQ ID NO:709). In some cases, a functional homolog of SEQ ID NO:705 has an amino acid sequence with at least 40% sequence identity, e.g., 50%, 52%, 56%, 59%, 61%, 65%, 70%, 75%, 80%, 85%, 90%, 95%, 97%, 98%, or 99% sequence identity, to the amino acid sequence set forth in SEQ ID NO:705.

[0080] Examples of amino acid sequences of functional homologs of the polypeptide set forth in SEQ ID NO:711 are provided in FIG. 6 and in the sequence listing. Such functional homologs include Ceres CLONE ID no. 964616 (SEQ ID NO:714), Ceres CLONE ID no. 100009667 (SEQ ID NO:715), Ceres ANNOT ID no. 1444568 (SEQ ID NO:719), Ceres CLONE ID no. 719489 (SEQ ID NO:725), Ceres CLONE ID no. 587748 (SEQ ID NO:733), Public GI ID no. 125528114 (SEQ ID NO:734), and Ceres CLONE ID no. 274172 (SEQ ID NO:737). Other functional homologs of SEQ ID NO:711 include Public GI ID no. 144923134 (SEQ ID NO:712), Ceres ANNOT ID no. 1471437 (SEQ ID NO:717), Ceres CLONE ID no. 1270484 (SEQ ID NO:721), Ceres CLONE ID no. 1075098 (SEQ ID NO:723), Public GI ID no. 18412211 (SEQ ID NO:727), Ceres CLONE ID no. 20358 (SEQ ID NO:729), Ceres CLONE ID no. 1915503 (SEQ ID NO:731), Public GI ID no. 115440619 (SEQ ID NO:735), Public GI ID no. 125572387 (SEQ ID NO:738), and Ceres ANNOT ID no. 6015812 (SEQ ID NO:740). In some cases, a functional homolog of SEQ ID NO:711 has an amino acid sequence with at least 40% sequence identity, e.g., 50%, 52%, 56%, 59%, 61%, 65%, 70%, 75%, 80%, 85%, 90%, 95%, 97%, 98%, or 99% sequence identity, to the amino acid sequence set forth in SEQ ID NO:711.

[0081] Examples of amino acid sequences of functional homologs of the polypeptide set forth in SEQ ID NO:742 are provided in FIG. 7 and in the sequence listing. Such functional homologs include Public GI ID no. 147783026 (SEQ ID NO: 743), Public GI ID no. 119367488 (SEQ ID NO: 744), Public GI ID no. 147860340 (SEQ ID NO: 745), Public GI ID no. 115477170 (SEQ ID NO: 757), Ceres CLONE ID no. 1620215 (SEQ ID NO: 759), Ceres CLONE ID no. 1931889 (SEQ ID NO: 761), Ceres CLONE ID no. 1798756 (SEQ ID NO: 763), Ceres CLONE ID no. 1918424 (SEQ ID NO: 767), Ceres CLONE ID no. 1845154 (SEQ ID NO: 771), Public GI ID no. 38016527 (SEQ ID NO: 796), Ceres Clone ID no. 1084216 (SEQ ID NO: 797), Public GI ID no. 113196593 (SEQ ID NO: 798), Public GI ID no. 75133829 (SEQ ID NO: 799), Ceres ANNOT ID no. 1460527 (SEQ ID NO: 801), Ceres Annot ID no. 8644540 (SEQ ID NO: 805), Ceres ANNOT ID no. 1450673 (SEQ ID NO: 807), Public GI ID no. 116778802 (SEQ ID NO: 808), Public GI ID no. 116778893 (SEQ ID NO: 809), Public GI ID no. 116778998 (SEQ ID NO: 810), Public GI ID no. 157849766 (SEQ ID NO: 811), Public GI ID no. 159474166 (SEQ ID NO: 812), Public GI ID no. 168036656 (SEQ ID NO: 813), Ceres ANNOT ID no. 1456578 (SEQ ID NO: 815), Public GI ID no. 168053490 (SEQ ID NO: 816), Public GI ID no. 193237563 (SEQ ID NO: 817), Ceres Clone ID no. 100879386 (SEQ ID NO: 819), Ceres Clone ID no. 2055733 (SEQ ID NO: 823), Ceres Clone ID no. 2056478 (SEQ ID NO: 825), Ceres CLONE ID no. 13007 (SEQ ID NO: 832), Ceres CLONE ID no. 5522 (SEQ ID NO: 834), Ceres CLONE ID no. 30543 (SEQ ID NO: 836), Ceres CLONE ID no. 14203 (SEQ ID NO: 839), Ceres CLONE ID no. 975913 (SEQ ID NO: 846), Ceres CLONE ID no. 967417 (SEQ ID NO: 848), Public GI ID no. 119720772 (SEQ ID NO: 857), Ceres CLONE ID no. 708446 (SEQ ID NO: 859), Ceres CLONE ID no. 1614593 (SEQ ID NO: 863), Ceres CLONE ID no. 2025938 (SEQ ID NO: 885), Public GI ID no. 92896423 (SEQ ID NO: 892), Ceres CLONE ID no. 634261 (SEQ ID NO: 900), Ceres CLONE ID no. 1387149 (SEQ ID NO: 912), Ceres CLONE ID no. 1423851 (SEQ ID NO: 918), Ceres CLONE ID no. 1589047 (SEQ ID NO: 939), Ceres CLONE ID no. 1748922 (SEQ ID NO: 944), Public GI ID no. 5031281 (SEQ ID NO: 953), Ceres CLONE ID no. 1775820 (SEQ ID NO: 955), Ceres CLONE ID no. 1787151 (SEQ ID NO: 957), Ceres CLONE ID no. 1765871 (SEQ ID NO: 973), Ceres CLONE ID no. 1990071 (SEQ ID NO: 977), Public GI ID no. 35187687 (SEQ ID NO: 988), Public GI ID no. 125556051 (SEQ ID NO: 989), Public GI ID no. 125561658 (SEQ ID NO: 990), Public GI ID no. 115468934 (SEQ ID NO: 991), Public GI ID no. 115470773 (SEQ ID NO: 992), Public GI ID no. 115444813 (SEQ ID NO: 993), Public GI ID no. 112819496 (SEQ ID NO: 999), Public GI ID no. 118424243 (SEQ ID NO: 1000), Ceres ANNOT ID no. 6063957 (SEQ ID NO: 1010), Public GI ID no. 169363 (SEQ ID NO:1215), Ceres CLONE ID no. 24255 (SEQ ID NO: 1242), Ceres Clone ID no. 1030374 (SEQ ID NO: 1306), Ceres Clone ID no. 1738028 (SEQ ID NO: 1308), Public GI ID no. 115455855 (SEQ ID NO: 1309), and Public GI ID no. 193237563 (SEQ ID NO: 1310). In some cases, a functional homolog of SEQ ID NO:742 has an amino acid sequence with at least 40% sequence identity, e.g., 50%, 52%, 56%, 59%, 61%, 65%, 70%, 75%, 80%, 85%, 90%, 95%, 97%, 98%, or 99% sequence identity, to the amino acid sequence set forth in SEQ ID NO:742.

[0082] Examples of amino acid sequences of functional homologs of the polypeptide set forth in SEQ ID NO:1012 are provided in FIG. 8 and in the sequence listing. Such functional homologs include Ceres CLONE ID no. 287430 (SEQ ID NO:1018), Ceres ANNOT ID no. 451889 (SEQ ID NO:1020), Ceres CLONE ID no. 936084 (SEQ ID NO:1055), Ceres CLONE ID no. 1792501 (SEQ ID NO:1066), Ceres ANNOT ID no. 1437875 (SEQ ID NO:1068), Public GI ID no. 1853968 (SEQ ID NO:1093), Public GI ID no. 27530032 (SEQ ID NO:1094), Ceres CLONE ID no. 1834483 (SEQ ID NO:1110), Public GI ID no. 84579418 (SEQ ID NO:1113), Public GI ID no. 15077030 (SEQ ID NO:1117), and Public GI ID no. 13752458 (SEQ ID NO:1118). Other functional homologs of SEQ ID NO:1012 include Public GI ID no. 147865685 (SEQ ID NO:1013), Public GI ID no. 119503368 (SEQ ID NO:1014), Public GI ID no. 72161874 (SEQ ID NO:1015), Public GI ID no. 91780661 (SEQ ID NO:1016), Ceres ANNOT ID no. 835908 (SEQ ID NO:1022), Public GI ID no. 38326750 (SEQ ID NO:1023), Ceres CLONE ID no. 1939396 (SEQ ID NO:1025), Ceres CLONE ID no. 403637 (SEQ ID NO:1027), Public GI ID no. 42539907 (SEQ ID NO:1028), Ceres CLONE ID no. 1836494 (SEQ ID NO:1030), Public GI ID no. 15192945 (SEQ ID NO:1031), Ceres CLONE ID no. 1607947 (SEQ ID NO:1033), Ceres CLONE ID no. 115880 (SEQ ID NO:1035), Ceres CLONE ID no. 1074009 (SEQ ID NO:1037), Ceres CLONE ID no. 476073 (SEQ ID NO:1039), Ceres CLONE ID no. 554053 (SEQ ID NO:1041), Ceres CLONE ID no. 391449 (SEQ ID NO:1045), Ceres CLONE ID no. 1846400 (SEQ ID NO:1048), Ceres ANNOT ID no. 1475185 (SEQ ID NO:1050), Public GI ID no. 115457148 (SEQ ID NO:1051), Ceres ANNOT ID no. 1454960 (SEQ ID NO:1053), Public GI ID no. 50346893 (SEQ ID NO:1056), Ceres CLONE ID no. 1931526 (SEQ ID NO:1058), Ceres ANNOT ID no. 1454260 (SEQ ID NO:1061), Public GI ID no. 115456131 (SEQ ID NO:1062), Ceres CLONE ID no. 159151 (SEQ ID NO:1064), Ceres CLONE ID no. 1842801 (SEQ ID NO:1071), Ceres CLONE ID no. 533030 (SEQ ID NO:1073), Ceres CLONE ID no. 1931881 (SEQ ID NO:1075), Ceres ANNOT ID no. 1480006 (SEQ ID NO:1077), Ceres CLONE ID no. 1895007 (SEQ ID NO:1079), Public GI ID no. 3598863 (SEQ ID NO:1080), Ceres ANNOT ID no. 1471735 (SEQ ID NO:1082), Ceres CLONE ID no. 1937530 (SEQ ID NO:1084), Ceres CLONE ID no. 1833050 (SEQ ID NO:1086), Ceres CLONE ID no. 644213 (SEQ ID NO:1088), Ceres CLONE ID no. 568154 (SEQ ID NO:1090), Ceres CLONE ID no. 527598 (SEQ ID NO:1092), Ceres ANNOT ID no. 1487614 (SEQ ID NO:1096), Ceres ANNOT ID no. 1541881 (SEQ ID NO:1098), Ceres ANNOT ID no. 1488465 (SEQ ID NO:1100), Ceres ANNOT ID no. 1488468 (SEQ ID NO:1102), Ceres ANNOT ID no. 1541884 (SEQ ID NO:1104), Ceres ANNOT ID no. 1454972 (SEQ ID NO:1106), Ceres ANNOT ID no. 1475186 (SEQ ID NO:1108), Ceres CLONE ID no. 686198 (SEQ ID NO:1112), Public GI ID no. 84579420 (SEQ ID NO:1114), Ceres CLONE ID no. 605144 (SEQ ID NO:1116), Public GI ID no. 15077028 (SEQ ID NO:1119), Ceres ANNOT ID no. 1454963 (SEQ ID NO:1121), Ceres ANNOT ID no. 6030208 (SEQ ID NO:1123), and Ceres ANNOT ID no. 6076767 (SEQ ID NO:1125). In some cases, a functional homolog of SEQ ID NO:1012 has an amino acid sequence with at least 40% sequence identity, e.g., 50%, 52%, 56%, 59%, 61%, 65%, 70%, 75%, 80%, 85%, 90%, 95%, 97%, 98%, or 99% sequence identity, to the amino acid sequence set forth in SEQ ID NO:1012.

[0083] Examples of amino acid sequences of functional homologs of the polypeptide set forth in SEQ ID NO:1129 are provided in FIG. 9 and in the sequence listing. Such functional homologs include Public GI ID no. 72255610 (SEQ ID NO:933), Ceres SEEDLINE ID no. ME20095 (SEQ ID NO:1129), Ceres CLONE ID no. 1562633 (SEQ ID NO:1140), Ceres ANNOT ID no. 1692728 (SEQ ID NO:1142), Ceres CLONE ID no. 921110 (SEQ ID NO:1144), Ceres CLONE ID no. 1791180 (SEQ ID NO:1146), Ceres CLONE ID no. 527891 (SEQ ID NO:1148), Ceres ANNOT ID no. 1522414 (SEQ ID NO:1150), and Public GI ID no. 51458330 (SEQ ID NO:1182). Other functional homologs of SEQ ID NO:1129 include Public GI ID no. 18399940 (SEQ ID NO:63), Ceres ANNOT ID no. 6107929 (SEQ ID NO:73), Ceres ANNOT ID no. 1473094 (SEQ ID NO:96), Ceres ANNOT ID no. 1503955 (SEQ ID NO:127), Ceres ANNOT ID no. 1526501 (SEQ ID NO:139), Public GI ID no. 15235713 (SEQ ID NO:179), Public GI ID no. 15234552 (SEQ ID NO:180), Ceres ANNOT ID no. 1520801 (SEQ ID NO:209), Ceres ANNOT ID no. 1443434 (SEQ ID NO:467), Public GI ID no. 30696058 (SEQ ID NO:559), Ceres ANNOT ID no. 1509601 (SEQ ID NO:648), Ceres ANNOT ID no. 1451912 (SEQ ID NO:726), Ceres ANNOT ID no. 6017545 (SEQ ID NO:741), Ceres ANNOT ID no. 1504999 (SEQ ID NO:765), Ceres ANNOT ID no. 1456402 (SEQ ID NO:773), Ceres ANNOT ID no. 1496359 (SEQ ID NO:781), Ceres ANNOT ID no. 1447260 (SEQ ID NO:842), Ceres ANNOT ID no. 1469023 (SEQ ID NO:861), Ceres ANNOT ID no. 1474186 (SEQ ID NO:865), Ceres ANNOT ID no. 1527596 (SEQ ID NO:867), Ceres CLONE ID no. 1919624 (SEQ ID NO:896), Ceres CLONE ID no. 677797 (SEQ ID NO:916), Public GI ID no. 7960729 (SEQ ID NO:932), Ceres CLONE ID no. 941845 (SEQ ID NO:1043), Public GI ID no. 30683008 (SEQ ID NO:1046), Public GI ID no. 42568786 (SEQ ID NO:1059), Ceres CLONE ID no. 255364 (SEQ ID NO:1069), Public GI ID no. 147771549 (SEQ ID NO:1130), Public GI ID no. 144924741 (SEQ ID NO:1131), Public GI ID no. 121594508 (SEQ ID NO:1132), Public GI ID no. 91202290 (SEQ ID NO:1133), Public GI ID no. 89900939 (SEQ ID NO:1134), Public GI ID no. 77917672 (SEQ ID NO:1135), Public GI ID no. 77165252 (SEQ ID NO:1136), Public GI ID no. 115375374 (SEQ ID NO:1137), Public GI ID no. 110602449 (SEQ ID NO:1138), Public GI ID no. 125540573 (SEQ ID NO:1151), Public GI ID no. 125561519 (SEQ ID NO:1152), Public GI ID no. 125528345 (SEQ ID NO:1153), Public GI ID no. 116310408 (SEQ ID NO:1154), Public GI ID no. 115483332 (SEQ ID NO:1156), Public GI ID no. 125575640 (SEQ ID NO:1157), Public GI ID no. 115476368 (SEQ ID NO:1158), Public GI ID no. 115478841 (SEQ ID NO:1159), Public GI ID no. 115467158 (SEQ ID NO:1160), Public GI ID no. 72384477 (SEQ ID NO:1161), Public GI ID no. 116054703 (SEQ ID NO:1162), Ceres CLONE ID no. 1786317 (SEQ ID NO:1164), Ceres CLONE ID no. 1791336 (SEQ ID NO:1166), Ceres CLONE ID no. 1877752 (SEQ ID NO:1168), Ceres CLONE ID no. 1821191 (SEQ ID NO:1170), Ceres CLONE ID no. 446838 (SEQ ID NO:1172), Ceres CLONE ID no. 1556915 (SEQ ID NO:1174), Public GI ID no. 90200725 (SEQ ID NO:1175), Ceres CLONE ID no. 1580247 (SEQ ID NO:1177), Ceres CLONE ID no. 644201 (SEQ ID NO:1179), Ceres CLONE ID no. 538689 (SEQ ID NO:1181), Ceres CLONE ID no. 817225 (SEQ ID NO:1184), and Ceres CLONE ID no. 923842 (SEQ ID NO:1186). In some cases, a functional homolog of SEQ ID NO:1129 has an amino acid sequence with at least 40% sequence identity, e.g., 50%, 52%, 56%, 59%, 61%, 65%, 70%, 75%, 80%, 85%, 90%, 95%, 97%, 98%, or 99% sequence identity, to the amino acid sequence set forth in SEQ ID NO:1129.

[0084] Examples of amino acid sequences of functional homologs of the polypeptide set forth in SEQ ID NO:60 are provided in FIG. 10 and in the sequence listing. Such functional homologs include Ceres CLONE ID no. 872030 (SEQ ID NO:62), Ceres CLONE ID no. 100029223 (SEQ ID NO:74), Ceres CLONE ID no. 1939845 (SEQ ID NO:98), Ceres CLONE ID no. 2015383 (SEQ ID NO:102), Ceres CLONE ID no. 1607893 (SEQ ID NO:104), Ceres CLONE ID no. 1075133 (SEQ ID NO:152), and Ceres CLONE ID no. 1218065 (SEQ ID NO:915). Other functional homologs of SEQ ID NO:60 include Public GI ID no. 15227919 (SEQ ID NO:64), Public GI ID no. 9843641 (SEQ ID NO:65), Public GI ID no. 124294789 (SEQ ID NO:66), Public GI ID no. 15233446 (SEQ ID NO:67), Public GI ID no. 115477679 (SEQ ID NO:68), Public GI ID no. 42407552 (SEQ ID NO:69), Public GI ID no. 125562450 (SEQ ID NO:70), Public GI ID no. 115469980 (SEQ ID NO:71), Ceres ANNOT ID no. 1442539 (SEQ ID NO:76), Ceres ANNOT ID no. 1442538 (SEQ ID NO:78), Ceres ANNOT ID no. 1460661 (SEQ ID NO:80), Ceres ANNOT ID no. 1452884 (SEQ ID NO:82), Ceres ANNOT ID no. 1450523 (SEQ ID NO:84), Ceres ANNOT ID no. 1442257 (SEQ ID NO:86), Ceres ANNOT ID no. 1541121 (SEQ ID NO:88), Ceres ANNOT ID no. 1480481 (SEQ ID NO:90), Ceres ANNOT ID no. 1487713 (SEQ ID NO:92), Ceres ANNOT ID no. 1456204 (SEQ ID NO:94), Ceres CLONE ID no. 1387402 (SEQ ID NO:100), Ceres CLONE ID no. 972919 (SEQ ID NO:106), Ceres CLONE ID no. 1645860 (SEQ ID NO:108), Ceres CLONE ID no. 1042804 (SEQ ID NO:110), Ceres CLONE ID no. 1606678 (SEQ ID NO:112), Ceres CLONE ID no. 684496 (SEQ ID NO:114), Ceres CLONE ID no. 1062366 (SEQ ID NO:116), Ceres CLONE ID no. 1722931 (SEQ ID NO:118), Ceres CLONE ID no. 746169 (SEQ ID NO:120), Ceres CLONE ID no. 1050475 (SEQ ID NO:122), Ceres CLONE ID no. 1728904 (SEQ ID NO:124), Ceres CLONE ID no. 1698538 (SEQ ID NO:126), Ceres CLONE ID no. 1762328 (SEQ ID NO:130), Ceres CLONE ID no. 1590072 (SEQ ID NO:132), Ceres CLONE ID no. 471593 (SEQ ID NO:134), Ceres CLONE ID no. 1031667 (SEQ ID NO:136), Ceres CLONE ID no. 1826085 (SEQ ID NO:138), Ceres CLONE ID no. 373932 (SEQ ID NO:142), Ceres CLONE ID no. 1797836 (SEQ ID NO:144), Ceres CLONE ID no. 1102774 (SEQ ID NO:146), Ceres CLONE ID no. 842287 (SEQ ID NO:148), Ceres CLONE ID no. 568205 (SEQ ID NO:150), Ceres ANNOT ID no. 6108997 (SEQ ID NO:154), Ceres ANNOT ID no. 6023609 (SEQ ID NO:156), and Ceres ANNOT ID no. 6017906 (SEQ ID NO:158). In some cases, a functional homolog of SEQ ID NO:60 has an amino acid sequence with at least 40% sequence identity, e.g., 50%, 52%, 56%, 59%, 61%, 65%, 70%, 75%, 80%, 85%, 90%, 95%, 97%, 98%, or 99% sequence identity, to the amino acid sequence set forth in SEQ ID NO:60.

[0085] Examples of amino acid sequences of functional homologs of the polypeptide set forth in SEQ ID NO:364 are provided in FIG. 11 and in the sequence listing. Such functional homologs include Ceres ANNOT ID no. 1455221 (SEQ ID NO:407), Public GI ID no. 729774 (SEQ ID NO:408), Ceres CLONE ID no. 1414288 (SEQ ID NO:410), Public GI ID no. 115482048 (SEQ ID NO:413), and Public GI ID no. 56117815 (SEQ ID NO:421). Other functional homologs of SEQ ID NO:364 include Ceres ANNOT ID no. 1485538 (SEQ ID NO:366), Ceres ANNOT ID no. 1538505 (SEQ ID NO:368), Public GI ID no. 8347238 (SEQ ID NO:369), Public GI ID no. 125542955 (SEQ ID NO:370), Public GI ID no. 115446219 (SEQ ID NO:371), Ceres CLONE ID no. 1597127 (SEQ ID NO:373), Ceres CLONE ID no. 1584568 (SEQ ID NO:375), Ceres CLONE ID no. 286056 (SEQ ID NO:377), Ceres ANNOT ID no. 1543432 (SEQ ID NO:379), Ceres CLONE ID no. 1728062 (SEQ ID NO:381), Ceres ANNOT ID no. 1448950 (SEQ ID NO:383), Ceres CLONE ID no. 771500 (SEQ ID NO:385), Ceres ANNOT ID no. 1485096 (SEQ ID NO:387), Ceres CLONE ID no. 1646104 (SEQ ID NO:389), Public GI ID no. 111184724 (SEQ ID NO:390), Ceres CLONE ID no. 1362475 (SEQ ID NO:392), Ceres CLONE ID no. 597906 (SEQ ID NO:394), Ceres CLONE ID no. 615781 (SEQ ID NO:396), Ceres CLONE ID no. 538713 (SEQ ID NO:398), Ceres CLONE ID no. 1794141 (SEQ ID NO:400), Public GI ID no. 5821138 (SEQ ID NO:401), Public GI ID no. 886742 (SEQ ID NO:402), Ceres CLONE ID no. 1814498 (SEQ ID NO:404), Public GI ID no. 7158882 (SEQ ID NO:405), Ceres ANNOT ID no. 1452564 (SEQ ID NO:412), Public GI ID no. 125557431 (SEQ ID NO:414), Ceres ANNOT ID no. 1442880 (SEQ ID NO:416), Ceres ANNOT ID no. 1463437 (SEQ ID NO:418), Public GI ID no. 42415865 (SEQ ID NO:419), Public GI ID no. 33087081 (SEQ ID NO:420), Public GI ID no. 115521217 (SEQ ID NO:422), Public GI ID no. 115521211 (SEQ ID NO:423), Public GI ID no. 115521215 (SEQ ID NO:424), Ceres ANNOT ID no. 1454376 (SEQ ID NO:426), Ceres CLONE ID no. 835571 (SEQ ID NO:428), Ceres ANNOT ID no. 1500046 (SEQ ID NO:430), Public GI ID no. 110738569 (SEQ ID NO:431), Public GI ID no. 125542510 (SEQ ID NO:432), Public GI ID no. 30686034 (SEQ ID NO:433), Public GI ID no. 125570883 (SEQ ID NO:434), Public GI ID no. 42562463 (SEQ ID NO:435), Ceres CLONE ID no. 100043265 (SEQ ID NO:436), Ceres ANNOT ID no. 6089790 (SEQ ID NO:438), and Ceres ANNOT ID no. 6043635 (SEQ ID NO:440). In some cases, a functional homolog of SEQ ID NO:364 has an amino acid sequence with at least 40% sequence identity, e.g., 50%, 52%, 56%, 59%, 61%, 65%, 70%, 75%, 80%, 85%, 90%, 95%, 97%, 98%, or 99% sequence identity, to the amino acid sequence set forth in SEQ ID NO:364.

[0086] Examples of amino acid sequences of functional homologs of the polypeptide set forth in SEQ ID NO:311 are provided in FIG. 12 and in the sequence listing. Such functional homologs include Ceres ANNOT ID no. 1538958 (SEQ ID NO:319), Public GI ID no. 115521213 (SEQ ID NO:320), Public GI ID no. 42415865 (SEQ ID NO:321), Public GI ID no. 729775 (SEQ ID NO:322), Public GI ID no. 11386827 (SEQ ID NO:323), Public GI ID no. 115456675 (SEQ ID NO:326), and Public GI ID no. 89274218 (SEQ ID NO:335). Other functional homologs of SEQ ID NO:311 include Public GI ID no. 125546035 (SEQ ID NO:312), Ceres CLONE ID no. 125228 (SEQ ID NO:314), Public GI ID no. 115465055 (SEQ ID NO:315), Public GI ID no. 125553080 (SEQ ID NO:316), Public GI ID no. 8920606 (SEQ ID NO:317), Ceres CLONE ID no. 1919643 (SEQ ID NO:325), Public GI ID no. 429155 (SEQ ID NO:327), Ceres CLONE ID no. 1194199 (SEQ ID NO:329), Public GI ID no. 15236631 (SEQ ID NO:330), Ceres ANNOT ID no. 1523420 (SEQ ID NO:332), Ceres ANNOT ID no. 1447046 (SEQ ID NO:334), Public GI ID no. 25296101 (SEQ ID NO:336), Public GI ID no. 15228440 (SEQ ID NO:337), Public GI ID no. 6624612 (SEQ ID NO:338), Public GI ID no. 125588688 (SEQ ID NO:339), Public GI ID no. 115470859 (SEQ ID NO:340), Public GI ID no. 15228865 (SEQ ID NO:341), Ceres CLONE ID no. 1571069 (SEQ ID NO:343), Public GI ID no. 115455903 (SEQ ID NO:344), Ceres ANNOT ID no. 1459422 (SEQ ID NO:346), Ceres CLONE ID no. 1577511 (SEQ ID NO:348), Public GI ID no. 115451657 (SEQ ID NO:349), Public GI ID no. 15225255 (SEQ ID NO:350), Public GI ID no. 125545695 (SEQ ID NO:351), Ceres ANNOT ID no. 1471817 (SEQ ID NO:353), Ceres ANNOT ID no. 1440896 (SEQ ID NO:355), Public GI ID no. 119393868 (SEQ ID NO:356), Ceres ANNOT ID no. 1517025 (SEQ ID NO:358), Ceres ANNOT ID no. 1512410 (SEQ ID NO:360), and Ceres ANNOT ID no. 6035498 (SEQ ID NO:362). In some cases, a functional homolog of SEQ ID NO:311 has an amino acid sequence with at least 40% sequence identity, e.g., 50%, 52%, 56%, 59%, 61%, 65%, 70%, 75%, 80%, 85%, 90%, 95%, 97%, 98%, or 99% sequence identity, to the amino acid sequence set forth in SEQ ID NO:311.

[0087] Examples of amino acid sequences of functional homologs of the polypeptide set forth in SEQ ID NO:160 are provided in FIG. 13 and in the sequence listing. Such functional homologs include Ceres CLONE ID no. 1837065 (SEQ ID NO:162), Ceres ANNOT ID no. 1531178 (SEQ ID NO:184), Ceres CLONE ID no. 470694 (SEQ ID NO:242), Public GI ID no. 92867368 (SEQ ID NO:253), Ceres CLONE ID no. 859707 (SEQ ID NO:256), Ceres CLONE ID no. 392275 (SEQ ID NO:268), Ceres CLONE ID no. 1828394 (SEQ ID NO:282), and Public GI ID no. 115466694 (SEQ ID NO:294). Other functional homologs of SEQ ID NO:160 include Ceres CLONE ID no. 1895763 (SEQ ID NO:164), Ceres CLONE ID no. 1850460 (SEQ ID NO:166), Ceres CLONE ID no. 1808074 (SEQ ID NO:168), Ceres CLONE ID no. 1832882 (SEQ ID NO:170), Ceres CLONE ID no. 1978977 (SEQ ID NO:172), Ceres CLONE ID no. 1918742 (SEQ ID NO:174), Ceres CLONE ID no. 1940023 (SEQ ID NO:176), Ceres CLONE ID no. 1923495 (SEQ ID NO:178), Ceres CLONE ID no. 1851388 (SEQ ID NO:182), Ceres ANNOT ID no. 1477681 (SEQ ID NO:186), Ceres ANNOT ID no. 1508800 (SEQ ID NO:188), Ceres ANNOT ID no. 1455597 (SEQ ID NO:190), Ceres ANNOT ID no. 1532016 (SEQ ID NO:192), Ceres ANNOT ID no. 1478526 (SEQ ID NO:194), Ceres ANNOT ID no. 1492567 (SEQ ID NO:196), Ceres ANNOT ID no. 1515273 (SEQ ID NO:198), Ceres ANNOT ID no. 1461979 (SEQ ID NO:200), Ceres ANNOT ID no. 1439702 (SEQ ID NO:202), Ceres ANNOT ID no. 1448044 (SEQ ID NO:204), Ceres ANNOT ID no. 1483370 (SEQ ID NO:206), Ceres ANNOT ID no. 1445651 (SEQ ID NO:208), Ceres ANNOT ID no. 1490863 (SEQ ID NO:212), Ceres ANNOT ID no. 1501043 (SEQ ID NO:214), Ceres ANNOT ID no. 1527507 (SEQ ID NO:216), Ceres ANNOT ID no. 1498633 (SEQ ID NO:218), Ceres ANNOT ID no. 1465403 (SEQ ID NO:220), Ceres ANNOT ID no. 1510956 (SEQ ID NO:222), Ceres ANNOT ID no. 1457735 (SEQ ID NO:224), Public GI ID no. 15224711 (SEQ ID NO:225), Ceres CLONE ID no. 40062 (SEQ ID NO:228), Public GI ID no. 15220315 (SEQ ID NO:229), Ceres CLONE ID no. 36480 (SEQ ID NO:231), Ceres CLONE ID no. 2443 (SEQ ID NO:233), Public GI ID no. 30685375 (SEQ ID NO:234), Public GI ID no. 126009434 (SEQ ID NO:235), Ceres CLONE ID no. 965753 (SEQ ID NO:237), Ceres CLONE ID no. 948834 (SEQ ID NO:239), Public GI ID no. 33347409 (SEQ ID NO:240), Ceres CLONE ID no. 643614 (SEQ ID NO:244), Ceres CLONE ID no. 1049362 (SEQ ID NO:246), Ceres CLONE ID no. 546675 (SEQ ID NO:248), Ceres CLONE ID no. 522046 (SEQ ID NO:250), Ceres CLONE ID no. 651076 (SEQ ID NO:252), Public GI ID no. 92897590 (SEQ ID NO:254), Ceres CLONE ID no. 634176 (SEQ ID NO:258), Ceres CLONE ID no. 1041432 (SEQ ID NO:260), Ceres CLONE ID no. 1065203 (SEQ ID NO:262), Ceres CLONE ID no. 555361 (SEQ ID NO:264), Ceres CLONE ID no. 704227 (SEQ ID NO:266), Ceres CLONE ID no. 100819945 (SEQ ID NO:269), Ceres CLONE ID no. 282584 (SEQ ID NO:271), Ceres CLONE ID no. 1448469 (SEQ ID NO:273), Ceres CLONE ID no. 241246 (SEQ ID NO:275), Ceres CLONE ID no. 234443 (SEQ ID NO:277), Ceres CLONE ID no. 293549 (SEQ ID NO:279), Public GI ID no. 109450926 (SEQ ID NO:280), Ceres CLONE ID no. 1803923 (SEQ ID NO:284), Ceres CLONE ID no. 2024557 (SEQ ID NO:286), Ceres CLONE ID no. 1820364 (SEQ ID NO:288), Public GI ID no. 125554274 (SEQ ID NO:289), Public GI ID no. 125531165 (SEQ ID NO:290), Public GI ID no. 125541514 (SEQ ID NO:291), Public GI ID no. 125557559 (SEQ ID NO:292), Public GI ID no. 125557844 (SEQ ID NO:293), Public GI ID no. 115449295 (SEQ ID NO:295), Public GI ID no. 115481182 (SEQ ID NO:296), Public GI ID no. 20177639 (SEQ ID NO:297), Public GI ID no. 115471021 (SEQ ID NO:298), Public GI ID no. 115456011 (SEQ ID NO:299), Public GI ID no. 125588290 (SEQ ID NO:300), Public GI ID no. 115477799 (SEQ ID NO:301), Public GI ID no. 115471385 (SEQ ID NO:302), Public GI ID no. 125599705 (SEQ ID NO:303), Public GI ID no. 115489810 (SEQ ID NO:304), Public GI ID no. 55276718 (SEQ ID NO:305), Ceres ANNOT ID no. 6025568 (SEQ ID NO:307), and Ceres ANNOT ID no. 6091128 (SEQ ID NO:309). In some cases, a functional homolog of SEQ ID NO:160 has an amino acid sequence with at least 40% sequence identity, e.g., 50%, 52%, 56%, 59%, 61%, 65%, 70%, 75%, 80%, 85%, 90%, 95%, 97%, 98%, or 99% sequence identity, to the amino acid sequence set forth in SEQ ID NO:160.

[0088] Examples of amino acid sequences of functional homologs of the polypeptide set forth in SEQ ID NO:2 are provided in FIG. 14 and in the sequence listing. Such functional homologs include Public GI ID no. 115470807 (SEQ ID NO:5), Ceres CLONE ID no. 1842931 (SEQ ID NO:15), Ceres CLONE ID no. 321308 (SEQ ID NO:17), Ceres CLONE ID no. 1725811 (SEQ ID NO:19), Ceres CLONE ID no. 1357455 (SEQ ID NO:21), Ceres CLONE ID no. 943370 (SEQ ID NO:23), Ceres CLONE ID no. 1327712 (SEQ ID NO:25), Ceres CLONE ID no. 1764692 (SEQ ID NO:27), and Ceres ANNOT ID no. 1512656 (SEQ ID NO:41). Other functional homologs of SEQ ID NO:2 include Public GI ID no. 18403425 (SEQ ID NO:3), Public GI ID no. 11994285 (SEQ ID NO:4), Public GI ID no. 108706298 (SEQ ID NO:6), Public GI ID no. 15233585 (SEQ ID NO:7), Public GI ID no. 125599279 (SEQ ID NO:8), Public GI ID no. 115450865 (SEQ ID NO:9), Public GI ID no. 22773244 (SEQ ID NO:10), Public GI ID no. 92874749 (SEQ ID NO:11), Ceres CLONE ID no. 1857034 (SEQ ID NO:13), Ceres CLONE ID no. 1059300 (SEQ ID NO:29), Ceres CLONE ID no. 1804869 (SEQ ID NO:31), Ceres CLONE ID no. 378863 (SEQ ID NO:33), Ceres CLONE ID no. 1930271 (SEQ ID NO:35), Ceres CLONE ID no. 2034728 (SEQ ID NO:37), Ceres CLONE ID no. 1866421 (SEQ ID NO:39), Ceres ANNOT ID no. 1463492 (SEQ ID NO:43), Ceres ANNOT ID no. 1459391 (SEQ ID NO:45), Ceres ANNOT ID no. 1442920 (SEQ ID NO:47), Ceres ANNOT ID no. 6011447 (SEQ ID NO:49), Ceres ANNOT ID no. 6068218 (SEQ ID NO:51), Ceres ANNOT ID no. 6044121 (SEQ ID NO:53), and Ceres ANNOT ID no. 6100755 (SEQ ID NO:55). In some cases, a functional homolog of SEQ ID NO:2 has an amino acid sequence with at least 40% sequence identity, e.g., 50%, 52%, 56%, 59%, 61%, 65%, 70%, 75%, 80%, 85%, 90%, 95%, 97%, 98%, or 99% sequence identity, to the amino acid sequence set forth in SEQ ID NO:2.

[0089] Examples of amino acid sequences of functional homologs of the polypeptide set forth in SEQ ID NO:749 are provided in FIG. 15 and in the sequence listing. Such functional homologs include Ceres CLONE ID no. 1847516 (SEQ ID NO:1195), Ceres CLONE ID no. 1961986 (SEQ ID NO:1201), and Ceres ANNOT ID no. 6091930 (SEQ ID NO:1207). Other functional homologs of SEQ ID NO:749 include Ceres CLONE ID no. 2025938 (SEQ ID NO:885), Ceres CLONE ID no. 1821214 (SEQ ID NO:1189), Ceres CLONE ID no. 1040399 (SEQ ID NO:1191), Ceres CLONE ID no. 1093691 (SEQ ID NO:1193), Ceres CLONE ID no. 974539 (SEQ ID NO:1197), Ceres CLONE ID no. 1832340 (SEQ ID NO:1199), Ceres CLONE ID no. 1933211 (SEQ ID NO:1203), Ceres CLONE ID no. 997558 (SEQ ID NO:1205), Ceres ANNOT ID no. 6041596 (SEQ ID NO:1209), Public GI ID no. 125564176 (SEQ ID NO:1210), Ceres CLONE ID no. 1836064 (SEQ ID NO:1212), Ceres CLONE ID no. 1909693 (SEQ ID NO:1214), Public GI ID no. 40287480 (SEQ ID NO:1216), Ceres CLONE ID no. 1765346 (SEQ ID NO:1218), Public GI ID no. 125546008 (SEQ ID NO:1219), Ceres CLONE ID no. 1950900 (SEQ ID NO:1221), Public GI ID no. 41350259 (SEQ ID NO:1222), Public GI ID no. 125588210 (SEQ ID NO:1223), Ceres CLONE ID no. 1954395 (SEQ ID NO:1225), Public GI ID no. 18403408 (SEQ ID NO:1226), Ceres CLONE ID no. 2010121 (SEQ ID NO:1228), Ceres ANNOT ID no. 6011486 (SEQ ID NO:1230), Public GI ID no. 25082726 (SEQ ID NO:1231), Public GI ID no. 113196593 (SEQ ID NO:1232), Ceres CLONE ID no. 1843021 (SEQ ID NO:1234), Ceres CLONE ID no. 1931194 (SEQ ID NO:1236), Ceres CLONE ID no. 1652996 (SEQ ID NO:1238), Ceres CLONE ID no. 1930044 (SEQ ID NO:1240), Ceres CLONE ID no. 24255 (SEQ ID NO:1242), Ceres ANNOT ID no. 6034955 (SEQ ID NO:1244), Ceres ANNOT ID no. 6119444 (SEQ ID NO:1246), Ceres ANNOT ID no. 6063956 (SEQ ID NO:1248), Ceres ANNOT ID no. 6015461 (SEQ ID NO:1250), Ceres CLONE ID no. 696244 (SEQ ID NO:1252), Ceres ANNOT ID no. 1468973 (SEQ ID NO:1254), Ceres CLONE ID no. 2019529 (SEQ ID NO:1256), and Ceres CLONE ID no. 1492169 (SEQ ID NO:1258). In some cases, a functional homolog of SEQ ID NO:749 has an amino acid sequence with at least 40% sequence identity, e.g., 50%, 52%, 56%, 59%, 61%, 65%, 70%, 75%, 80%, 85%, 90%, 95%, 97%, 98%, or 99% sequence identity, to the amino acid sequence set forth in SEQ ID NO:749.

[0090] Examples of amino acid sequences of functional homologs of the polypeptide set forth in SEQ ID NO:1311 are provided in FIG. 16 and in the sequence listing. Such functional homologs include CeresClone: 971761 (SEQ ID NO: 1313), CeresClone: 1946574 (SEQ ID NO: 1331), CeresClone: 2055551 (SEQ ID NO: 1340), CeresClone: 100045499 (SEQ ID NO: 1347), CeresClone: 1465853 (SEQ ID NO: 1353), CeresClone: 753982 (SEQ ID NO: 1360), CeresClone: 1076093 (SEQ ID NO: 1315), CeresClone: 1627875 (SEQ ID NO: 1317), CeresAnnot: 1508362 (SEQ ID NO: 1319), CeresAnnot: 1526950 (SEQ ID NO: 1321), CeresClone: 1832333 (SEQ ID NO: 1323), GI: 74272607 (SEQ ID NO: 1324), GI: 192910782 (SEQ ID NO: 1325), GI: 157342563 (SEQ ID NO: 1326), GI: 159483497 (SEQ ID NO: 1327), CeresClone: 1839999 (SEQ ID NO: 1329), CeresClone: 467335 (SEQ ID NO: 1333), GI: 168010087 (SEQ ID NO: 1334), CeresClone: 1728202 (SEQ ID NO: 1336), CeresClone: 1994239 (SEQ ID NO: 1338), CeresAnnot: 8704704 (SEQ ID NO: 1342), GI: 115453877 (SEQ ID NO: 1343), CeresClone: 1646411 (SEQ ID NO: 1345), CeresClone: 100920260 (SEQ ID NO: 1349), GI: 116786147 (SEQ ID NO: 1350), GI: 116783944 (SEQ ID NO: 1351), GI: 82623397 (SEQ ID NO: 1354), CeresAnnot: 8656662 (SEQ ID NO: 1356), CeresClone: 1417803 (SEQ ID NO: 1358), and GI: 145345927 (SEQ ID NO: 1361). In some cases, a functional homolog of SEQ ID NO:1311 has an amino acid sequence with at least 40% sequence identity, e.g., 50%, 52%, 56%, 59%, 61%, 65%, 70%, 75%, 80%, 85%, 90%, 95%, 97%, 98%, or 99% sequence identity, to the amino acid sequence set forth in SEQ ID NO:1311.

[0091] The identification of conserved regions in a heat and/or drought-tolerance polypeptide facilitates production of variants of heat and/or drought-tolerance polypeptides. Variants of heat and/or drought-tolerance polypeptides typically have 10 or fewer conservative amino acid substitutions within the primary amino acid sequence, e.g., 7 or fewer conservative amino acid substitutions, 5 or fewer conservative amino acid substitutions, or between 1 and 5 conservative substitutions. A useful variant polypeptide can be constructed based on one of the alignments set forth in FIGS. 1-16. Such a polypeptide includes the conserved regions, arranged in the order depicted in the Figure from amino-terminal end to carboxy-terminal end. Such a polypeptide may also include zero, one, or more than one amino acid in positions marked by dashes. When no amino acids are present at positions marked by dashes, the length of such a polypeptide is the sum of the amino acid residues in all conserved regions. When amino acids are present at all positions marked by dashes, such a polypeptide has a length that is the sum of the amino acid residues in all conserved regions and all dashes.

[0092] C. Functional Homologs Identified by HMMER

[0093] In some embodiments, useful heat and/or drought-tolerance polypeptides include those that fit a Hidden Markov Model based on the polypeptides set forth in any one of FIGS. 1-16. A Hidden Markov Model (HMM) is a statistical model of a consensus sequence for a group of functional homologs. See, Durbin et al., Biological Sequence Analysis: Probabilistic Models of Proteins and Nucleic Acids, Cambridge University Press, Cambridge, UK (1998). An HMM is generated by the program HMMER 2.3.2 with default program parameters, using the sequences of the group of functional homologs as input. The multiple sequence alignment is generated by ProbCons (Do et al., Genome Res., 15(2):330-40 (2005)) version 1.11 using a set of default parameters: -c, —consistency REPS of 2; -ir, —iterative-refinement REPS of 100; -pre, —pre-training REPS of 0. ProbCons is a public domain software program provided by Stanford University.

[0094] The default parameters for building an HMM (hmmbuild) are as follows: the default “architecture prior” (archpri) used by MAP architecture construction is 0.85, and the default cutoff threshold (idlevel) used to determine the effective sequence number is 0.62. HMMER 2.3.2 was released Oct. 3, 2003 under a GNU general public license, and is available from various sources on the World Wide Web such as hmmer.janelia.org; hmmer.wustl.edu; and fr.com/hmmer232/. Hmmbuild outputs the model as a text file.

[0095] The HMM for a group of functional homologs can be used to determine the likelihood that a candidate heat and/or drought-tolerance polypeptide sequence is a better fit to that particular HMM than to a null HMM generated using a group of sequences that are not structurally or functionally related. The likelihood that a candidate polypeptide sequence is a better fit to an HMM than to a null HMM is indicated by the HMM bit score, a number generated when the candidate sequence is fitted to the HMM profile using the HMMER hmmsearch program. The following default parameters are used when running hmmsearch: the default E-value cutoff (E) is 10, the default bit score cutoff (T) is negative infinity, the default number of sequences in a database (Z) is the real number of sequences in the database, the default E-value cutoff for the per-domain ranked hit list (domE) is infinity, and the default bit score cutoff for the per-domain ranked hit list (domT) is negative infinity. A high HMM bit score indicates a greater likelihood that the candidate sequence carries out one or more of the biochemical or physiological function(s) of the polypeptides used to generate the HMM. A high HMM bit score is at least 20, and often is higher. Slight variations in the HMM bit score of a particular sequence can occur due to factors such as the order in which sequences are processed for alignment by multiple sequence alignment algorithms such as the ProbCons program. Nevertheless, such HMM bit score variation is minor.

[0096] The heat and/or drought-tolerance polypeptides discussed below fit the indicated HMM with an HMM bit score greater than 20 (e.g., greater than 30, 40, 50, 60, 70, 80, 90, 100, 200, 300, 400, or 500). In some embodiments, the HMM bit score of a heat and/or drought-tolerance polypeptide discussed below is about 50%, 60%, 70%, 80%, 90%, or 95% of the HMM bit score of a functional homolog provided in Sequence Listing. In some embodiments, a heat and/or drought-tolerance polypeptide discussed below fits the indicated HMM with an HMM bit score greater than 20, and has a domain indicative of a heat and/or drought-tolerance polypeptide. In some embodiments, a heat and/or drought-tolerance polypeptide discussed below fits the indicated HMM with an HMM bit score greater than 20, and has 70% or greater sequence identity (e.g., 75%, 80%, 85%, 90%, 95%, or 100% sequence identity) to an amino acid sequence shown in any one of FIGS. 1-16.

[0097] Polypeptides are shown in the sequence listing that have HMM bit scores greater than 270 when fitted to an HMM generated from the amino acid sequences set forth in FIG. 1. Such polypeptides include Ceres SEEDLINE ID no. ME00029 (SEQ ID NO:442), Public GI ID no. 72384401 (SEQ ID NO:443), Ceres CLONE ID no. 1079382 (SEQ ID NO:445), Ceres CLONE ID no. 1853461 (SEQ ID NO:447), Ceres CLONE ID no. 1626485 (SEQ ID NO:451), Ceres CLONE ID no. 1713920 (SEQ ID NO:459), Ceres CLONE ID no. 1772747 (SEQ ID NO:463), Ceres CLONE ID no. 225960 (SEQ ID NO:465), Public GI ID no. 115443807 (SEQ ID NO:470), Ceres CLONE ID no. 569388 (SEQ ID NO:483), Ceres CLONE ID no. 1915549 (SEQ ID NO:449), Ceres CLONE ID no. 529871 (SEQ ID NO:453), Ceres CLONE ID no. 1067079 (SEQ ID NO:455), Ceres CLONE ID no. 1079572 (SEQ ID NO:457), Ceres ANNOT ID no. 1456550 (SEQ ID NO:461), Ceres CLONE ID no. 1437889 (SEQ ID NO:469), Ceres CLONE ID no. 2014249 (SEQ ID NO:472), Ceres CLONE ID no. 2033133 (SEQ ID NO:474), Ceres CLONE ID no. 707404 (SEQ ID NO:476), Ceres CLONE ID no. 1770680 (SEQ ID NO:478), Ceres ANNOT ID no. 1450989 (SEQ ID NO:480), Public GI ID no. 72384445 (SEQ ID NO:481), Ceres CLONE ID no. 1059299 (SEQ ID NO:485), and Ceres ANNOT ID no. 6008086 (SEQ ID NO:487.

[0098] Polypeptides are shown in the sequence listing that have HMM bit scores greater than 100 when fitted to an HMM generated from the amino acid sequences set forth in FIG. 2. Such polypeptides include Ceres SEEDLINE ID no. ME00045 (SEQ ID NO:489), Ceres CLONE ID no. 571200 (SEQ ID NO:494), Ceres CLONE ID no. 1928532 (SEQ ID NO:496), Ceres ANNOT ID no. 1490637 (SEQ ID NO:498), Ceres CLONE ID no. 295496 (SEQ ID NO:514), Public GI ID no. 115463637 (SEQ ID NO:515), Ceres CLONE ID no. 1999444 (SEQ ID NO:518), Public GI ID no. 147844794 (SEQ ID NO:490), Public GI ID no. 147842279 (SEQ ID NO:491), Public GI ID no. 145355441 (SEQ ID NO:492), Ceres ANNOT ID no. 1461381 (SEQ ID NO:500), Ceres ANNOT ID no. 1440313 (SEQ ID NO:502), Ceres ANNOT ID no. 1448275 (SEQ ID NO:504), Ceres ANNOT ID no. 1437838 (SEQ ID NO:506), Ceres ANNOT ID no. 1501275 (SEQ ID NO:508), Ceres CLONE ID no. 1644562 (SEQ ID NO:510), Ceres CLONE ID no. 1925967 (SEQ ID NO:512), Public GI ID no. 115435904 (SEQ ID NO:516), Public GI ID no. 125552168 (SEQ ID NO:519), Public GI ID no. 125594093 (SEQ ID NO:520), Ceres CLONE ID no. 221188 (SEQ ID NO:522), Ceres ANNOT ID no. 1477714 (SEQ ID NO:524), Ceres CLONE ID no. 1787953 (SEQ ID NO:526), Ceres ANNOT ID no. 1531210 (SEQ ID NO:528), Ceres CLONE ID no. 521176 (SEQ ID NO:530), Public GI ID no. 22327055 (SEQ ID NO:531), Ceres ANNOT ID no. 1508824 (SEQ ID NO:533), Ceres CLONE ID no. 38879 (SEQ ID NO:535), Public GI ID no. 42569309 (SEQ ID NO:536), Ceres CLONE ID no. 1817784 (SEQ ID NO:538), Ceres CLONE ID no. 284637 (SEQ ID NO:540), Public GI ID no. 125596251 (SEQ ID NO:541), Public GI ID no. 125554300 (SEQ ID NO:543), Ceres CLONE ID no. 1935437 (SEQ ID NO:545), Ceres ANNOT ID no. 1455622 (SEQ ID NO:547), Public GI ID no. 55771354 (SEQ ID NO:548), Ceres ANNOT ID no. 1514655 (SEQ ID NO:550), Ceres CLONE ID no. 1848736 (SEQ ID NO:552), Public GI ID no. 125569872 (SEQ ID NO:553), Ceres CLONE ID no. 1645078 (SEQ ID NO:555), Ceres CLONE ID no. 1790573 (SEQ ID NO:557), Public GI ID no. 4567251 (SEQ ID NO:558), Ceres CLONE ID no. 444113 (SEQ ID NO:561), Public GI ID no. 125525355 (SEQ ID NO:562), Ceres ANNOT ID no. 6028854 (SEQ ID NO:564), and Ceres ANNOT ID no. 6115356 (SEQ ID NO:566).

[0099] Polypeptides are shown in the sequence listing that have HMM bit scores greater than 150 when fitted to an HMM generated from the amino acid sequences set forth in FIG. 3. Such polypeptides include Ceres SEEDLINE ID no. ME02190 (SEQ ID NO:568), Ceres CLONE ID no. 695006 (SEQ ID NO:578), Ceres ANNOT ID no. 1527488 (SEQ ID NO:584), Public GI ID no. 79318519 (SEQ ID NO:569), Public GI ID no. 79318537 (SEQ ID NO:570), Ceres CLONE ID no. 956998 (SEQ ID NO:572), Ceres CLONE ID no. 978154 (SEQ ID NO:574), Ceres CLONE ID no. 1035628 (SEQ ID NO:576), Ceres CLONE ID no. 464169 (SEQ ID NO:580), Ceres ANNOT ID no. 1474075 (SEQ ID NO:582), Ceres ANNOT ID no. 1474073 (SEQ ID NO:586), and Ceres ANNOT ID no. 1527486 (SEQ ID NO:588).

[0100] Polypeptides are shown in the sequence listing that have HMM bit scores greater than 120 when fitted to an HMM generated from the amino acid sequences set forth in FIG. 4. Such polypeptides include Ceres SEEDLINE ID no. ME02549 (SEQ ID NO:590), Ceres ANNOT ID no. 1501305 (SEQ ID NO:623), Ceres CLONE ID no. 607280 (SEQ ID NO:627), Public GI ID no. 92887174 (SEQ ID NO:632), Ceres CLONE ID no. 1857162 (SEQ ID NO:634), Public GI ID no. 115477272 (SEQ ID NO:674), Ceres CLONE ID no. 264002 (SEQ ID NO:682), Public GI ID no. 147822456 (SEQ ID NO:591), Public GI ID no. 144923935 (SEQ ID NO:592), Public GI ID no. 140038730 (SEQ ID NO:593), Public GI ID no. 78708014 (SEQ ID NO:594), Public GI ID no. 115481362 (SEQ ID NO:595), Public GI ID no. 125531350 (SEQ ID NO:596), Public GI ID no. 125525598 (SEQ ID NO:597), Public GI ID no. 77548630 (SEQ ID NO:598), Public GI ID no. 46798895 (SEQ ID NO:599), Public GI ID no. 125564653 (SEQ ID NO:600), Ceres CLONE ID no. 998865 (SEQ ID NO:602), Public GI ID no. 125556140 (SEQ ID NO:603), Public GI ID no. 125534482 (SEQ ID NO:604), Public GI ID no. 125550135 (SEQ ID NO:605), Ceres CLONE ID no. 639816 (SEQ ID NO:607), Public GI ID no. 125562170 (SEQ ID NO:608), Ceres CLONE ID no. 1797059 (SEQ ID NO:610), Ceres CLONE ID no. 1031510 (SEQ ID NO:612), Ceres CLONE ID no. 1973081 (SEQ ID NO:614), Public GI ID no. 125561002 (SEQ ID NO:615), Public GI ID no. 125541732 (SEQ ID NO:616), Public GI ID no. 125560677 (SEQ ID NO:617), Public GI ID no. 125559115 (SEQ ID NO:618), Public GI ID no. 15809903 (SEQ ID NO:619), Public GI ID no. 30681703 (SEQ ID NO:620), Public GI ID no. 9759556 (SEQ ID NO:621), Ceres ANNOT ID no. 1448303 (SEQ ID NO:625), Ceres ANNOT ID no. 1448305 (SEQ ID NO:629), Ceres ANNOT ID no. 1448307 (SEQ ID NO:631), Public GI ID no. 92888243 (SEQ ID NO:635), Public GI ID no. 92879395 (SEQ ID NO:636), Ceres CLONE ID no. 528876 (SEQ ID NO:638), Ceres ANNOT ID no. 1448352 (SEQ ID NO:640), Ceres ANNOT ID no. 1437745 (SEQ ID NO:642), Ceres ANNOT ID no. 1464146 (SEQ ID NO:644), Ceres ANNOT ID no. 1437744 (SEQ ID NO:646), Public GI ID no. 92894684 (SEQ ID NO:647), Ceres CLONE ID no. 3964 (SEQ ID NO:650), Public GI ID no. 13272389 (SEQ ID NO:651), Ceres ANNOT ID no. 1481203 (SEQ ID NO:653), Public GI ID no. 15227699 (SEQ ID NO:654), Public GI ID no. 92886084 (SEQ ID NO:655), Public GI ID no. 15239947 (SEQ ID NO:656), Ceres CLONE ID no. 34878 (SEQ ID NO:658), Ceres CLONE ID no. 150484 (SEQ ID NO:660), Public GI ID no. 21553545 (SEQ ID NO:661), Public GI ID no. 15222843 (SEQ ID NO:662), Public GI ID no. 38230552 (SEQ ID NO:663), Public GI ID no. 3420008 (SEQ ID NO:664), Public GI ID no. 15230602 (SEQ ID NO:665), Public GI ID no. 3420004 (SEQ ID NO:666), Public GI ID no. 2129586 (SEQ ID NO:667), Public GI ID no. 15217849 (SEQ ID NO:668), Public GI ID no. 15227704 (SEQ ID NO:669), Ceres ANNOT ID no. 1465750 (SEQ ID NO:671), Ceres CLONE ID no. 1983975 (SEQ ID NO:673), Public GI ID no. 15226028 (SEQ ID NO:675), Public GI ID no. 115459524 (SEQ ID NO:676), Ceres CLONE ID no. 1793353 (SEQ ID NO:678), Ceres ANNOT ID no. 1467399 (SEQ ID NO:680), Ceres CLONE ID no. 1982930 (SEQ ID NO:684), Public GI ID no. 125540700 (SEQ ID NO:685), Ceres ANNOT ID no. 1448743 (SEQ ID NO:687), Public GI ID no. 50251910 (SEQ ID NO:688), Ceres CLONE ID no. 1836748 (SEQ ID NO:690), Public GI ID no. 3420006 (SEQ ID NO:691), Public GI ID no. 92879376 (SEQ ID NO:692), Ceres CLONE ID no. 838941 (SEQ ID NO:694), Ceres ANNOT ID no. 1437746 (SEQ ID NO:696), Ceres ANNOT ID no. 6017241 (SEQ ID NO:698), Ceres ANNOT ID no. 6085947 (SEQ ID NO:700), and Ceres ANNOT ID no. 6017242 (SEQ ID NO:702).

[0101] Polypeptides are shown in the sequence listing that have HMM bit scores greater than 55 when fitted to an HMM generated from the amino acid sequences set forth in FIG. 5. Such polypeptides include Ceres SEEDLINE ID no. ME02865 (SEQ ID NO:705), Public GI ID no. 79320952 (SEQ ID NO:706), Public GI ID no. 79320957 (SEQ ID NO:707), Public GI ID no. 6692094 (SEQ ID NO:708), and Public GI ID no. 145323049 (SEQ ID NO:709).

[0102] Polypeptides are shown in the sequence listing that have HMM bit scores greater than 185 when fitted to an HMM generated from the amino acid sequences set forth in FIG. 6. Such polypeptides include Ceres SEEDLINE ID no. ME03227 (SEQ ID NO:711), Ceres CLONE ID no. 964616 (SEQ ID NO:714), Ceres CLONE ID no. 100009667 (SEQ ID NO:715), Ceres ANNOT ID no. 1444568 (SEQ ID NO:719), Ceres CLONE ID no. 719489 (SEQ ID NO:725), Ceres CLONE ID no. 587748 (SEQ ID NO:733), Public GI ID no. 125528114 (SEQ ID NO:734), Ceres CLONE ID no. 274172 (SEQ ID NO:737), Public GI ID no. 144923134 (SEQ ID NO:712), Ceres ANNOT ID no. 1471437 (SEQ ID NO:717), Ceres CLONE ID no. 1270484 (SEQ ID NO:721), Ceres CLONE ID no. 1075098 (SEQ ID NO:723), Public GI ID no. 18412211 (SEQ ID NO:727), Ceres CLONE ID no. 20358 (SEQ ID NO:729), Ceres CLONE ID no. 1915503 (SEQ ID NO:731), Public GI ID no. 115440619 (SEQ ID NO:735), Public GI ID no. 125572387 (SEQ ID NO:738), and Ceres ANNOT ID no. 6015812 (SEQ ID NO:740).

[0103] Polypeptides are shown in the sequence listing that have HMM bit scores greater than 110 when fitted to an HMM generated from the amino acid sequences set forth in FIG. 7. Such polypeptides include Ceres SEEDLINE ID no. ME04477 (SEQ ID NO:742), Ceres CLONE ID no. 1620215 (SEQ ID NO: 759); Ceres CLONE ID no. 1798756 (SEQ ID NO: 763); Public GI ID no. 38016527 (SEQ ID NO: 796); Public GI ID no. 75133829 (SEQ ID NO: 799); Ceres ANNOT ID no. 1460527 (SEQ ID NO: 801); Public GI ID no. 119720772 (SEQ ID NO: 857); Ceres CLONE ID no. 708446 (SEQ ID NO: 859); Public GI ID no. 92896423 (SEQ ID NO: 892); Ceres CLONE ID no. 1387149 (SEQ ID NO: 912); Public GI ID no. 5031281 (SEQ ID NO: 953); Ceres CLONE ID no. 1775820 (SEQ ID NO: 955); Public GI ID no. 35187687 (SEQ ID NO: 988); Public GI ID no. 115468934 (SEQ ID NO: 991); Public GI ID no. 118424243 (SEQ ID NO: 1000); Ceres ANNOT ID no. 6063957 (SEQ ID NO: 1010); Public GI ID no. 113196593 (SEQ ID NO: 798); Public GI ID no. 112819496 (SEQ ID NO: 999); Public GI ID no. 147783026 (SEQ ID NO: 743); Public GI ID no. 119367488 (SEQ ID NO: 744); Public GI ID no. 147860340 (SEQ ID NO: 745); Public GI ID no. 115477170 (SEQ ID NO: 757); Ceres CLONE ID no. 1931889 (SEQ ID NO: 761); Ceres CLONE ID no. 1918424 (SEQ ID NO: 767); Ceres CLONE ID no. 1845154 (SEQ ID NO: 771); Ceres Clone ID no. 1084216 (SEQ ID NO: 797); Ceres Annot ID no. 8644540 (SEQ ID NO: 805); Ceres ANNOT ID no. 1450673 (SEQ ID NO: 807); Public GI ID no. 116778802 (SEQ ID NO: 808); Public GI ID no. 116778893 (SEQ ID NO: 809); and Public GI ID no. 116778998 (SEQ ID NO: 810); Public GI ID no. 157849766 (SEQ ID NO: 811); Public GI ID no. 159474166 (SEQ ID NO: 812); Public GI ID no. 168036656 (SEQ ID NO: 813); Ceres ANNOT ID no. 1456578 (SEQ ID NO: 815); Public GI ID no. 168053490 (SEQ ID NO: 816); Public GI ID no. 193237563 (SEQ ID NO: 817); Ceres Clone ID no. 100879386 (SEQ ID NO: 819); Ceres Clone ID no. 2055733 (SEQ ID NO: 823); Ceres Clone ID no. 2056478 (SEQ ID NO: 825); Ceres CLONE ID no. 13007 (SEQ ID NO: 832); Ceres CLONE ID no. 5522 (SEQ ID NO: 834); Ceres CLONE ID no. 30543 (SEQ ID NO: 836); Ceres CLONE ID no. 14203 (SEQ ID NO: 839); Ceres CLONE ID no. 975913 (SEQ ID NO: 846); Ceres CLONE ID no. 967417 (SEQ ID NO: 848); Ceres CLONE ID no. 1614593 (SEQ ID NO: 863); Ceres CLONE ID no. 2025938 (SEQ ID NO: 885); Ceres CLONE ID no. 634261 (SEQ ID NO: 900); Ceres CLONE ID no. 1423851 (SEQ ID NO: 918); Ceres CLONE ID no. 1589047 (SEQ ID NO: 939); Ceres CLONE ID no. 1748922 (SEQ ID NO: 944); Ceres CLONE ID no. 1787151 (SEQ ID NO: 957); Ceres CLONE ID no. 1765871 (SEQ ID NO: 973); Ceres CLONE ID no. 1990071 (SEQ ID NO: 977); Public GI ID no. 125556051 (SEQ ID NO: 989); Public GI ID no. 125561658 (SEQ ID NO: 990); Public GI ID no. 115470773 (SEQ ID NO: 992); Public GI ID no. 115444813 (SEQ ID NO: 993); GI ID no. 169363 (SEQ ID NO: 1215) and Ceres CLONE ID no. 24255 (SEQ ID NO: 1242).

[0104] Polypeptides are shown in the sequence listing that have HMM bit scores greater than 215 when fitted to an HMM generated from the amino acid sequences set forth in FIG. 8. Such polypeptides include Ceres SEEDLINE ID no. ME18396 (SEQ ID NO:1012), Ceres CLONE ID no. 287430 (SEQ ID NO:1018), Ceres ANNOT ID no. 451889 (SEQ ID NO:1020), Ceres CLONE ID no. 936084 (SEQ ID NO:1055), Ceres CLONE ID no. 1792501 (SEQ ID NO:1066), Ceres ANNOT ID no. 1437875 (SEQ ID NO:1068), Public GI ID no. 1853968 (SEQ ID NO:1093), Public GI ID no. 27530032 (SEQ ID NO:1094), Ceres CLONE ID no. 1834483 (SEQ ID NO:1110), Public GI ID no. 84579418 (SEQ ID NO:1113), Public GI ID no. 15077030 (SEQ ID NO:1117), Public GI ID no. 13752458 (SEQ ID NO:1118), Public GI ID no. 147865685 (SEQ ID NO:1013), Public GI ID no. 119503368 (SEQ ID NO:1014), Public GI ID no. 72161874 (SEQ ID NO:1015), Public GI ID no. 91780661 (SEQ ID NO:1016), Ceres ANNOT ID no. 835908 (SEQ ID NO:1022), Public GI ID no. 38326750 (SEQ ID NO:1023), Ceres CLONE ID no. 1939396 (SEQ ID NO:1025), Ceres CLONE ID no. 403637 (SEQ ID NO:1027), Public GI ID no. 42539907 (SEQ ID NO:1028), Ceres CLONE ID no. 1836494 (SEQ ID NO:1030), Public GI ID no. 15192945 (SEQ ID NO:1031), Ceres CLONE ID no. 1607947 (SEQ ID NO:1033), Ceres CLONE ID no. 115880 (SEQ ID NO:1035), Ceres CLONE ID no. 1074009 (SEQ ID NO:1037), Ceres CLONE ID no. 476073 (SEQ ID NO:1039), Ceres CLONE ID no. 554053 (SEQ ID NO:1041), Ceres CLONE ID no. 391449 (SEQ ID NO:1045), Ceres CLONE ID no. 1846400 (SEQ ID NO:1048), Ceres ANNOT ID no. 1475185 (SEQ ID NO:1050), Public GI ID no. 115457148 (SEQ ID NO:1051), Ceres ANNOT ID no. 1454960 (SEQ ID NO:1053), Public GI ID no. 50346893 (SEQ ID NO:1056), Ceres CLONE ID no. 1931526 (SEQ ID NO:1058), Ceres ANNOT ID no. 1454260 (SEQ ID NO:1061), Public GI ID no. 115456131 (SEQ ID NO:1062), Ceres CLONE ID no. 159151 (SEQ ID NO:1064), Ceres CLONE ID no. 1842801 (SEQ ID NO:1071), Ceres CLONE ID no. 533030 (SEQ ID NO:1073), Ceres CLONE ID no. 1931881 (SEQ ID NO:1075), Ceres ANNOT ID no. 1480006 (SEQ ID NO:1077), Ceres CLONE ID no. 1895007 (SEQ ID NO:1079), Public GI ID no. 3598863 (SEQ ID NO:1080), Ceres ANNOT ID no. 1471735 (SEQ ID NO:1082), Ceres CLONE ID no. 1937530 (SEQ ID NO:1084), Ceres CLONE ID no. 1833050 (SEQ ID NO:1086), Ceres CLONE ID no. 644213 (SEQ ID NO:1088), Ceres CLONE ID no. 568154 (SEQ ID NO:1090), Ceres CLONE ID no. 527598 (SEQ ID NO:1092), Ceres ANNOT ID no. 1487614 (SEQ ID NO:1096), Ceres ANNOT ID no. 1541881 (SEQ ID NO:1098), Ceres ANNOT ID no. 1488465 (SEQ ID NO:1100), Ceres ANNOT ID no. 1488468 (SEQ ID NO:1102), Ceres ANNOT ID no. 1541884 (SEQ ID NO:1104), Ceres ANNOT ID no. 1454972 (SEQ ID NO:1106), Ceres ANNOT ID no. 1475186 (SEQ ID NO:1108), Ceres CLONE ID no. 686198 (SEQ ID NO:1112), Public GI ID no. 84579420 (SEQ ID NO:1114), Ceres CLONE ID no. 605144 (SEQ ID NO:1116), Public GI ID no. 15077028 (SEQ ID NO:1119), Ceres ANNOT ID no. 1454963 (SEQ ID NO:1121), Ceres ANNOT ID no. 6030208 (SEQ ID NO:1123), and Ceres ANNOT ID no. 6076767 (SEQ ID NO:1125).

[0105] Polypeptides are shown in the sequence listing that have HMM bit scores greater than 105 when fitted to an HMM generated from the amino acid sequences set forth in FIG. 9. Such polypeptides include Ceres SEEDLINE ID no. ME20095 (SEQ ID NO:1129), Public GI ID no. 72255610 (SEQ ID NO:933), Ceres SEEDLINE ID no. ME20095 (SEQ ID NO:1129), Ceres CLONE ID no. 1562633 (SEQ ID NO:1140), Ceres ANNOT ID no. 1692728 (SEQ ID NO:1142), Ceres CLONE ID no. 921110 (SEQ ID NO:1144), Ceres CLONE ID no. 1791180 (SEQ ID NO:1146), Ceres CLONE ID no. 527891 (SEQ ID NO:1148), Ceres ANNOT ID no. 1522414 (SEQ ID NO:1150), Public GI ID no. 51458330 (SEQ ID NO:1182), Public GI ID no. 18399940 (SEQ ID NO:63), Ceres ANNOT ID no. 6107929 (SEQ ID NO:73), Ceres ANNOT ID no. 1473094 (SEQ ID NO:96), Ceres ANNOT ID no. 1503955 (SEQ ID NO:127), Ceres ANNOT ID no. 1526501 (SEQ ID NO:139), Public GI ID no. 15235713 (SEQ ID NO:179), Public GI ID no. 15234552 (SEQ ID NO:180), Ceres ANNOT ID no. 1520801 (SEQ ID NO:209), Ceres ANNOT ID no. 1443434 (SEQ ID NO:467), Public GI ID no. 30696058 (SEQ ID NO:559), Ceres ANNOT ID no. 1509601 (SEQ ID NO:648), Ceres ANNOT ID no. 1451912 (SEQ ID NO:726), Ceres ANNOT ID no. 6017545 (SEQ ID NO:741), Ceres ANNOT ID no. 1504999 (SEQ ID NO:765), Ceres ANNOT ID no. 1456402 (SEQ ID NO:773), Ceres ANNOT ID no. 1496359 (SEQ ID NO:781), Ceres ANNOT ID no. 1447260 (SEQ ID NO:842), Ceres ANNOT ID no. 1469023 (SEQ ID NO:861), Ceres ANNOT ID no. 1474186 (SEQ ID NO:865), Ceres ANNOT ID no. 1527596 (SEQ ID NO:867), Ceres CLONE ID no. 1919624 (SEQ ID NO:896), Ceres CLONE ID no. 677797 (SEQ ID NO:916), Public GI ID no. 7960729 (SEQ ID NO:932), Ceres CLONE ID no. 941845 (SEQ ID NO:1043), Public GI ID no. 30683008 (SEQ ID NO:1046), Public GI ID no. 42568786 (SEQ ID NO:1059), Ceres CLONE ID no. 255364 (SEQ ID NO:1069), Public GI ID no. 147771549 (SEQ ID NO:1130), Public GI ID no. 144924741 (SEQ ID NO:1131), Public GI ID no. 121594508 (SEQ ID NO:1132), Public GI ID no. 91202290 (SEQ ID NO:1133), Public GI ID no. 89900939 (SEQ ID NO:1134), Public GI ID no. 77917672 (SEQ ID NO:1135), Public GI ID no. 77165252 (SEQ ID NO:1136), Public GI ID no. 115375374 (SEQ ID NO:1137), Public GI ID no. 110602449 (SEQ ID NO:1138), Public GI ID no. 125540573 (SEQ ID NO:1151), Public GI ID no. 125561519 (SEQ ID NO:1152), Public GI ID no. 125528345 (SEQ ID NO:1153), Public GI ID no. 116310408 (SEQ ID NO:1154), Public GI ID no. 115483332 (SEQ ID NO:1156), Public GI ID no. 125575640 (SEQ ID NO:1157), Public GI ID no. 115476368 (SEQ ID NO:1158), Public GI ID no. 115478841 (SEQ ID NO:1159), Public GI ID no. 115467158 (SEQ ID NO:1160), Public GI ID no. 72384477 (SEQ ID NO:1161), Public GI ID no. 116054703 (SEQ ID NO:1162), Ceres CLONE ID no. 1786317 (SEQ ID NO:1164), Ceres CLONE ID no. 1791336 (SEQ ID NO:1166), Ceres CLONE ID no. 1877752 (SEQ ID NO:1168), Ceres CLONE ID no. 1821191 (SEQ ID NO:1170), Ceres CLONE ID no. 446838 (SEQ ID NO:1172), Ceres CLONE ID no. 1556915 (SEQ ID NO:1174), Public GI ID no. 90200725 (SEQ ID NO:1175), Ceres CLONE ID no. 1580247 (SEQ ID NO:1177), Ceres CLONE ID no. 644201 (SEQ ID NO:1179), Ceres CLONE ID no. 538689 (SEQ ID NO:1181), Ceres CLONE ID no. 817225 (SEQ ID NO:1184), and Ceres CLONE ID no. 923842 (SEQ ID NO:1186).

[0106] Polypeptides are shown in the sequence listing that have HMM bit scores greater than 55 when fitted to an HMM generated from the amino acid sequences set forth in FIG. 10. Such polypeptides include Ceres CLONE ID no. 31309 (SEQ ID NO:60), Ceres CLONE ID no. 872030 (SEQ ID NO:62), Ceres CLONE ID no. 100029223 (SEQ ID NO:74), Ceres CLONE ID no. 1939845 (SEQ ID NO:98), Ceres CLONE ID no. 2015383 (SEQ ID NO:102), Ceres CLONE ID no. 1607893 (SEQ ID NO:104), Ceres CLONE ID no. 1075133 (SEQ ID NO:152), Ceres CLONE ID no. 1218065 (SEQ ID NO:915), Public GI ID no. 15227919 (SEQ ID NO:64), Public GI ID no. 9843641 (SEQ ID NO:65), Public GI ID no. 124294789 (SEQ ID NO:66), Public GI ID no. 15233446 (SEQ ID NO:67), Public GI ID no. 115477679 (SEQ ID NO:68), Public GI ID no. 42407552 (SEQ ID NO:69), Public GI ID no. 125562450 (SEQ ID NO:70), Public GI ID no. 115469980 (SEQ ID NO:71), Ceres ANNOT ID no. 1442539 (SEQ ID NO:76), Ceres ANNOT ID no. 1442538 (SEQ ID NO:78), Ceres ANNOT ID no. 1460661 (SEQ ID NO:80), Ceres ANNOT ID no. 1452884 (SEQ ID NO:82), Ceres ANNOT ID no. 1450523 (SEQ ID NO:84), Ceres ANNOT ID no. 1442257 (SEQ ID NO:86), Ceres ANNOT ID no. 1541121 (SEQ ID NO:88), Ceres ANNOT ID no. 1480481 (SEQ ID NO:90), Ceres ANNOT ID no. 1487713 (SEQ ID NO:92), Ceres ANNOT ID no. 1456204 (SEQ ID NO:94), Ceres CLONE ID no. 1387402 (SEQ ID NO:100), Ceres CLONE ID no. 972919 (SEQ ID NO:106), Ceres CLONE ID no. 1645860 (SEQ ID NO:108), Ceres CLONE ID no. 1042804 (SEQ ID NO:110), Ceres CLONE ID no. 1606678 (SEQ ID NO:112), Ceres CLONE ID no. 684496 (SEQ ID NO:114), Ceres CLONE ID no. 1062366 (SEQ ID NO:116), Ceres CLONE ID no. 1722931 (SEQ ID NO:118), Ceres CLONE ID no. 746169 (SEQ ID NO:120), Ceres CLONE ID no. 1050475 (SEQ ID NO:122), Ceres CLONE ID no. 1728904 (SEQ ID NO:124), Ceres CLONE ID no. 1698538 (SEQ ID NO:126), Ceres CLONE ID no. 1762328 (SEQ ID NO:130), Ceres CLONE ID no. 1590072 (SEQ ID NO:132), Ceres CLONE ID no. 471593 (SEQ ID NO:134), Ceres CLONE ID no. 1031667 (SEQ ID NO:136), Ceres CLONE ID no. 1826085 (SEQ ID NO:138), Ceres CLONE ID no. 373932 (SEQ ID NO:142), Ceres CLONE ID no. 1797836 (SEQ ID NO:144), Ceres CLONE ID no. 1102774 (SEQ ID NO:146), Ceres CLONE ID no. 842287 (SEQ ID NO:148), Ceres CLONE ID no. 568205 (SEQ ID NO:150), Ceres ANNOT ID no. 6108997 (SEQ ID NO:154), Ceres ANNOT ID no. 6023609 (SEQ ID NO:156), and Ceres ANNOT ID no. 6017906 (SEQ ID NO:158).

[0107] Polypeptides are shown in the sequence listing that have HMM bit scores greater than 55 when fitted to an HMM generated from the amino acid sequences set forth in FIG. 11. Such polypeptides include Ceres LOCUS ID no.At2g26150 (SEQ ID NO:364), Ceres ANNOT ID no. 1455221 (SEQ ID NO:407), Public GI ID no. 729774 (SEQ ID NO:408), Ceres CLONE ID no. 1414288 (SEQ ID NO:410), Public GI ID no. 115482048 (SEQ ID NO:413), Public GI ID no. 56117815 (SEQ ID NO:421), Ceres ANNOT ID no. 1485538 (SEQ ID NO:366), Ceres ANNOT ID no. 1538505 (SEQ ID NO:368), Public GI ID no. 8347238 (SEQ ID NO:369), Public GI ID no. 125542955 (SEQ ID NO:370), Public GI ID no. 115446219 (SEQ ID NO:371), Ceres CLONE ID no. 1597127 (SEQ ID NO:373), Ceres CLONE ID no. 1584568 (SEQ ID NO:375), Ceres CLONE ID no. 286056 (SEQ ID NO:377), Ceres ANNOT ID no. 1543432 (SEQ ID NO:379), Ceres CLONE ID no. 1728062 (SEQ ID NO:381), Ceres ANNOT ID no. 1448950 (SEQ ID NO:383), Ceres CLONE ID no. 771500 (SEQ ID NO:385), Ceres ANNOT ID no. 1485096 (SEQ ID NO:387), Ceres CLONE ID no. 1646104 (SEQ ID NO:389), Public GI ID no. 111184724 (SEQ ID NO:390), Ceres CLONE ID no. 1362475 (SEQ ID NO:392), Ceres CLONE ID no. 597906 (SEQ ID NO:394), Ceres CLONE ID no. 615781 (SEQ ID NO:396), Ceres CLONE ID no. 538713 (SEQ ID NO:398), Ceres CLONE ID no. 1794141 (SEQ ID NO:400), Public GI ID no. 5821138 (SEQ ID NO:401), Public GI ID no. 886742 (SEQ ID NO:402), Ceres CLONE ID no. 1814498 (SEQ ID NO:404), Public GI ID no. 7158882 (SEQ ID NO:405), Ceres ANNOT ID no. 1452564 (SEQ ID NO:412), Public GI ID no. 125557431 (SEQ ID NO:414), Ceres ANNOT ID no. 1442880 (SEQ ID NO:416), Ceres ANNOT ID no. 1463437 (SEQ ID NO:418), Public GI ID no. 42415865 (SEQ ID NO:419), Public GI ID no. 33087081 (SEQ ID NO:420), Public GI ID no. 115521217 (SEQ ID NO:422), Public GI ID no. 115521211 (SEQ ID NO:423), Public GI ID no. 115521215 (SEQ ID NO:424), Ceres ANNOT ID no. 1454376 (SEQ ID NO:426), Ceres CLONE ID no. 835571 (SEQ ID NO:428), Ceres ANNOT ID no. 1500046 (SEQ ID NO:430), Public GI ID no. 110738569 (SEQ ID NO:431), Public GI ID no. 125542510 (SEQ ID NO:432), Public GI ID no. 30686034 (SEQ ID NO:433), Public GI ID no. 125570883 (SEQ ID NO:434), Public GI ID no. 42562463 (SEQ ID NO:435), Ceres CLONE ID no. 100043265 (SEQ ID NO:436), Ceres ANNOT ID no. 6089790 (SEQ ID NO:438), and Ceres ANNOT ID no. 6043635 (SEQ ID NO:440).

[0108] Polypeptides are shown in the sequence listing that have HMM bit scores greater than 50 when fitted to an HMM generated from the amino acid sequences set forth in FIG. 12. Such polypeptides include Ceres LOCUS ID no.At1g32330 (SEQ ID NO:311), Ceres ANNOT ID no. 1538958 (SEQ ID NO:319), Public GI ID no. 115521213 (SEQ ID NO:320), Public GI ID no. 42415865 (SEQ ID NO:321), Public GI ID no. 729775 (SEQ ID NO:322), Public GI ID no. 11386827 (SEQ ID NO:323), Public GI ID no. 115456675 (SEQ ID NO:326), Public GI ID no. 89274218 (SEQ ID NO:335), Public GI ID no. 125546035 (SEQ ID NO:312), Ceres CLONE ID no. 125228 (SEQ ID NO:314), Public GI ID no. 115465055 (SEQ ID NO:315), Public GI ID no. 125553080 (SEQ ID NO:316), Public GI ID no. 8920606 (SEQ ID NO:317), Ceres CLONE ID no. 1919643 (SEQ ID NO:325), Public GI ID no. 429155 (SEQ ID NO:327), Ceres CLONE ID no. 1194199 (SEQ ID NO:329), Public GI ID no. 15236631 (SEQ ID NO:330), Ceres ANNOT ID no. 1523420 (SEQ ID NO:332), Ceres ANNOT ID no. 1447046 (SEQ ID NO:334), Public GI ID no. 25296101 (SEQ ID NO:336), Public GI ID no. 15228440 (SEQ ID NO:337), Public GI ID no. 6624612 (SEQ ID NO:338), Public GI ID no. 125588688 (SEQ ID NO:339), Public GI ID no. 115470859 (SEQ ID NO:340), Public GI ID no. 15228865 (SEQ ID NO:341), Ceres CLONE ID no. 1571069 (SEQ ID NO:343), Public GI ID no. 115455903 (SEQ ID NO:344), Ceres ANNOT ID no. 1459422 (SEQ ID NO:346), Ceres CLONE ID no. 1577511 (SEQ ID NO:348), Public GI ID no. 115451657 (SEQ ID NO:349), Public GI ID no. 15225255 (SEQ ID NO:350), Public GI ID no. 125545695 (SEQ ID NO:351), Ceres ANNOT ID no. 1471817 (SEQ ID NO:353), Ceres ANNOT ID no. 1440896 (SEQ ID NO:355), Public GI ID no. 119393868 (SEQ ID NO:356), Ceres ANNOT ID no. 1517025 (SEQ ID NO:358), Ceres ANNOT ID no. 1512410 (SEQ ID NO:360), and Ceres ANNOT ID no. 6035498 (SEQ ID NO:362).

[0109] Polypeptides are shown in the sequence listing that have HMM bit scores greater than 25 when fitted to an HMM generated from the amino acid sequences set forth in FIG. 13. Such polypeptides include Ceres CLONE ID no. 41543 (SEQ ID NO:160) Ceres CLONE ID no. 1837065 (SEQ ID NO:162), Ceres ANNOT ID no. 1531178 (SEQ ID NO:184), Ceres CLONE ID no. 470694 (SEQ ID NO:242), Public GI ID no. 92867368 (SEQ ID NO:253), Ceres CLONE ID no. 859707 (SEQ ID NO:256), Ceres CLONE ID no. 392275 (SEQ ID NO:268), Ceres CLONE ID no. 1828394 (SEQ ID NO:282), Public GI ID no. 115466694 (SEQ ID NO:294), Ceres CLONE ID no. 1895763 (SEQ ID NO:164), Ceres CLONE ID no. 1850460 (SEQ ID NO:166), Ceres CLONE ID no. 1808074 (SEQ ID NO:168), Ceres CLONE ID no. 1832882 (SEQ ID NO:170), Ceres CLONE ID no. 1978977 (SEQ ID NO:172), Ceres CLONE ID no. 1918742 (SEQ ID NO:174), Ceres CLONE ID no. 1940023 (SEQ ID NO:176), Ceres CLONE ID no. 1923495 (SEQ ID NO:178), Ceres CLONE ID no. 1851388 (SEQ ID NO:182), Ceres ANNOT ID no. 1477681 (SEQ ID NO:186), Ceres ANNOT ID no. 1508800 (SEQ ID NO:188), Ceres ANNOT ID no. 1455597 (SEQ ID NO:190), Ceres ANNOT ID no. 1532016 (SEQ ID NO:192), Ceres ANNOT ID no. 1478526 (SEQ ID NO:194), Ceres ANNOT ID no. 1492567 (SEQ ID NO:196), Ceres ANNOT ID no. 1515273 (SEQ ID NO:198), Ceres ANNOT ID no. 1461979 (SEQ ID NO:200), Ceres ANNOT ID no. 1439702 (SEQ ID NO:202), Ceres ANNOT ID no. 1448044 (SEQ ID NO:204), Ceres ANNOT ID no. 1483370 (SEQ ID NO:206), Ceres ANNOT ID no. 1445651 (SEQ ID NO:208), Ceres ANNOT ID no. 1490863 (SEQ ID NO:212), Ceres ANNOT ID no. 1501043 (SEQ ID NO:214), Ceres ANNOT ID no. 1527507 (SEQ ID NO:216), Ceres ANNOT ID no. 1498633 (SEQ ID NO:218), Ceres ANNOT ID no. 1465403 (SEQ ID NO:220), Ceres ANNOT ID no. 1510956 (SEQ ID NO:222), Ceres ANNOT ID no. 1457735 (SEQ ID NO:224), Public GI ID no. 15224711 (SEQ ID NO:225), Ceres CLONE ID no. 40062 (SEQ ID NO:228), Public GI ID no. 15220315 (SEQ ID NO:229), Ceres CLONE ID no. 36480 (SEQ ID NO:231), Ceres CLONE ID no. 2443 (SEQ ID NO:233), Public GI ID no. 30685375 (SEQ ID NO:234), Public GI ID no. 126009434 (SEQ ID NO:235), Ceres CLONE ID no. 965753 (SEQ ID NO:237), Ceres CLONE ID no. 948834 (SEQ ID NO:239), Public GI ID no. 33347409 (SEQ ID NO:240), Ceres CLONE ID no. 643614 (SEQ ID NO:244), Ceres CLONE ID no. 1049362 (SEQ ID NO:246), Ceres CLONE ID no. 546675 (SEQ ID NO:248), Ceres CLONE ID no. 522046 (SEQ ID NO:250), Ceres CLONE ID no. 651076 (SEQ ID NO:252), Public GI ID no. 92897590 (SEQ ID NO:254), Ceres CLONE ID no. 634176 (SEQ ID NO:258), Ceres CLONE ID no. 1041432 (SEQ ID NO:260), Ceres CLONE ID no. 1065203 (SEQ ID NO:262), Ceres CLONE ID no. 555361 (SEQ ID NO:264), Ceres CLONE ID no. 704227 (SEQ ID NO:266), Ceres CLONE ID no. 100819945 (SEQ ID NO:269), Ceres CLONE ID no. 282584 (SEQ ID NO:271), Ceres CLONE ID no. 1448469 (SEQ ID NO:273), Ceres CLONE ID no. 241246 (SEQ ID NO:275), Ceres CLONE ID no. 234443 (SEQ ID NO:277), Ceres CLONE ID no. 293549 (SEQ ID NO:279), Public GI ID no. 109450926 (SEQ ID NO:280), Ceres CLONE ID no. 1803923 (SEQ ID NO:284), Ceres CLONE ID no. 2024557 (SEQ ID NO:286), Ceres CLONE ID no. 1820364 (SEQ ID NO:288), Public GI ID no. 125554274 (SEQ ID NO:289), Public GI ID no. 125531165 (SEQ ID NO:290), Public GI ID no. 125541514 (SEQ ID NO:291), Public GI ID no. 125557559 (SEQ ID NO:292), Public GI ID no. 125557844 (SEQ ID NO:293), Public GI ID no. 115449295 (SEQ ID NO:295), Public GI ID no. 115481182 (SEQ ID NO:296), Public GI ID no. 20177639 (SEQ ID NO:297), Public GI ID no. 115471021 (SEQ ID NO:298), Public GI ID no. 115456011 (SEQ ID NO:299), Public GI ID no. 125588290 (SEQ ID NO:300), Public GI ID no. 115477799 (SEQ ID NO:301), Public GI ID no. 115471385 (SEQ ID NO:302), Public GI ID no. 125599705 (SEQ ID NO:303), Public GI ID no. 115489810 (SEQ ID NO:304), Public GI ID no. 55276718 (SEQ ID NO:305), Ceres ANNOT ID no. 6025568 (SEQ ID NO:307), and Ceres ANNOT ID no. 6091128 (SEQ ID NO:309).

[0110] Polypeptides are shown in the sequence listing that have HMM bit scores greater than 85 when fitted to an HMM generated from the amino acid sequences set forth in FIG. 14. Such polypeptides include Ceres CLONE ID no. 14572 (SEQ ID NO:2), Public GI ID no. 115470807 (SEQ ID NO:5), Ceres CLONE ID no. 1842931 (SEQ ID NO:15), Ceres CLONE ID no. 321308 (SEQ ID NO:17), Ceres CLONE ID no. 1725811 (SEQ ID NO:19), Ceres CLONE ID no. 1357455 (SEQ ID NO:21), Ceres CLONE ID no. 943370 (SEQ ID NO:23), Ceres CLONE ID no. 1327712 (SEQ ID NO:25), Ceres CLONE ID no. 1764692 (SEQ ID NO:27), Ceres ANNOT ID no. 1512656 (SEQ ID NO:41), Public GI ID no. 18403425 (SEQ ID NO:3), Public GI ID no. 11994285 (SEQ ID NO:4), Public GI ID no. 108706298 (SEQ ID NO:6), Public GI ID no. 15233585 (SEQ ID NO:7), Public GI ID no. 125599279 (SEQ ID NO:8), Public GI ID no. 115450865 (SEQ ID NO:9), Public GI ID no. 22773244 (SEQ ID NO:10), Public GI ID no. 92874749 (SEQ ID NO:11), Ceres CLONE ID no. 1857034 (SEQ ID NO:13), Ceres CLONE ID no. 1059300 (SEQ ID NO:29), Ceres CLONE ID no. 1804869 (SEQ ID NO:31), Ceres CLONE ID no. 378863 (SEQ ID NO:33), Ceres CLONE ID no. 1930271 (SEQ ID NO:35), Ceres CLONE ID no. 2034728 (SEQ ID NO:37), Ceres CLONE ID no. 1866421 (SEQ ID NO:39), Ceres ANNOT ID no. 1463492 (SEQ ID NO:43), Ceres ANNOT ID no. 1459391 (SEQ ID NO:45), Ceres ANNOT ID no. 1442920 (SEQ ID NO:47), Ceres ANNOT ID no. 6011447 (SEQ ID NO:49), Ceres ANNOT ID no. 6068218 (SEQ ID NO:51), Ceres ANNOT ID no. 6044121 (SEQ ID NO:53), and Ceres ANNOT ID no. 6100755 (SEQ ID NO:55).

[0111] Polypeptides are shown in the sequence listing that have HMM bit scores greater than 70 when fitted to an HMM generated from the amino acid sequences set forth in FIG. 15. Such polypeptides include Ceres SEEDLINE ID no. ME02401 (SEQ ID NO:749), Ceres CLONE ID no. 1847516 (SEQ ID NO:1195), Ceres CLONE ID no. 1961986 (SEQ ID NO:1201), Ceres ANNOT ID no. 6091930 (SEQ ID NO:1207), Ceres CLONE ID no. 2025938 (SEQ ID NO:885), Ceres CLONE ID no. 1821214 (SEQ ID NO:1189), Ceres CLONE ID no. 1040399 (SEQ ID NO:1191), Ceres CLONE ID no. 1093691 (SEQ ID NO:1193), Ceres CLONE ID no. 974539 (SEQ ID NO:1197), Ceres CLONE ID no. 1832340 (SEQ ID NO:1199), Ceres CLONE ID no. 1933211 (SEQ ID NO:1203), Ceres CLONE ID no. 997558 (SEQ ID NO:1205), Ceres ANNOT ID no. 6041596 (SEQ ID NO:1209), Public GI ID no. 125564176 (SEQ ID NO:1210), Ceres CLONE ID no. 1836064 (SEQ ID NO:1212), Ceres CLONE ID no. 1909693 (SEQ ID NO:1214), Public GI ID no. 169363 (SEQ ID NO:1215), Public GI ID no. 40287480 (SEQ ID NO:1216), Ceres CLONE ID no. 1765346 (SEQ ID NO:1218), Public GI ID no. 125546008 (SEQ ID NO:1219), Ceres CLONE ID no. 1950900 (SEQ ID NO:1221), Public GI ID no. 41350259 (SEQ ID NO:1222), Public GI ID no. 125588210 (SEQ ID NO:1223), Ceres CLONE ID no. 1954395 (SEQ ID NO:1225), Public GI ID no. 18403408 (SEQ ID NO:1226), Ceres CLONE ID no. 2010121 (SEQ ID NO:1228), Ceres ANNOT ID no. 6011486 (SEQ ID NO:1230), Public GI ID no. 25082726 (SEQ ID NO:1231), Public GI ID no. 113196593 (SEQ ID NO:1232), Ceres CLONE ID no. 1843021 (SEQ ID NO:1234), Ceres CLONE ID no. 1931194 (SEQ ID NO:1236), Ceres CLONE ID no. 1652996 (SEQ ID NO:1238), Ceres CLONE ID no. 1930044 (SEQ ID NO:1240), Ceres CLONE ID no. 24255 (SEQ ID NO:1242), Ceres ANNOT ID no. 6034955 (SEQ ID NO:1244), Ceres ANNOT ID no. 6119444 (SEQ ID NO:1246), Ceres ANNOT ID no. 6063956 (SEQ ID NO:1248), Ceres ANNOT ID no. 6015461 (SEQ ID NO:1250), Ceres CLONE ID no. 696244 (SEQ ID NO:1252), Ceres ANNOT ID no. 1468973 (SEQ ID NO:1254), Ceres CLONE ID no. 2019529 (SEQ ID NO:1256), and Ceres CLONE ID no. 1492169 (SEQ ID NO:1258).

[0112] Polypeptides are shown in the sequence listing that have HMM bit scores greater than about 300 when fitted to an HMM generated from the amino acid sequences set forth in FIG. 16. Such polypeptides include Ceres SEEDLINE ID no. ME004246 (SEQ ID NO: 1311), CeresClone: 971761 (SEQ ID NO: 1313), CeresClone: 1946574 (SEQ ID NO: 1331), CeresClone: 2055551 (SEQ ID NO: 1340), CeresClone: 100045499 (SEQ ID NO: 1347), CeresClone: 1465853 (SEQ ID NO: 1353), CeresClone: 753982 (SEQ ID NO: 1360), CeresClone: 1076093 (SEQ ID NO: 1315), CeresClone: 1627875 (SEQ ID NO: 1317), CeresAnnot: 1508362 (SEQ ID NO: 1319), CeresAnnot: 1526950 (SEQ ID NO: 1321), CeresClone: 1832333 (SEQ ID NO: 1323), GI: 74272607 (SEQ ID NO: 1324), GI: 192910782 (SEQ ID NO: 1325), GI: 157342563 (SEQ ID NO: 1326), GI: 159483497 (SEQ ID NO: 1327), CeresClone: 1839999 (SEQ ID NO: 1329), CeresClone: 467335 (SEQ ID NO: 1333), GI: 168010087 (SEQ ID NO: 1334), CeresClone: 1728202 (SEQ ID NO: 1336), CeresClone: 1994239 (SEQ ID NO: 1338), CeresAnnot: 8704704 (SEQ ID NO: 1342), GI: 115453877 (SEQ ID NO: 1343), CeresClone: 1646411 (SEQ ID NO: 1345), CeresClone: 100920260 (SEQ ID NO: 1349), GI: 116786147 (SEQ ID NO: 1350), GI: 116783944 (SEQ ID NO: 1351), GI: 82623397 (SEQ ID NO: 1354), CeresAnnot: 8656662 (SEQ ID NO: 1356), CeresClone: 1417803 (SEQ ID NO: 1358), and GI: 145345927 (SEQ ID NO: 1361).

[0113] D. Percent Identity

[0114] In some embodiments, a heat and/or drought-tolerance polypeptide has an amino acid sequence with at least 20% sequence identity, e.g., 21%, 22%, 24%, 27%, 30%, 33%, 38%, 45%, 46%, 49%, 50%, 52%, 56%, 59%, 61%, 65%, 70%, 75%, 80%, 85%, 90%, 95%, 97%, 98%, or 99% sequence identity, to one of the amino acid sequences set forth in SEQ ID NO:442, SEQ ID NO:489, SEQ ID NO:568, SEQ ID NO:590, SEQ ID NO:705, SEQ ID NO:711, SEQ ID NO:742, SEQ ID NO:1012, SEQ ID NO:1129, SEQ ID NO:60, SEQ ID NO:364, SEQ ID NO:311, SEQ ID NO:160, SEQ ID NO:2, SEQ ID NO:749, SEQ ID NO: 1131, and SEQ ID NO:57. Polypeptides having such a percent sequence identity often have a domain indicative of a heat and/or drought-tolerance polypeptide and/or have an HMM bit score that is greater than 20, as discussed above. Amino acid sequences of heat and/or drought-tolerance polypeptides having at least 20% sequence identity to one of the amino acid sequences set forth in SEQ ID NO:442, SEQ ID NO:489, SEQ ID NO:568, SEQ ID NO:590, SEQ ID NO:705, SEQ ID NO:711, SEQ ID NO:742, SEQ ID NO:1012, SEQ ID NO:1129, SEQ ID NO:60, SEQ ID NO:364, SEQ ID NO:311, SEQ ID NO:160, SEQ ID NO:2, SEQ ID NO: 1131, and SEQ ID NO:749 are provided in FIGS. 1-16.

[0115] “Percent sequence identity” refers to the degree of sequence identity between any given reference sequence, e.g., SEQ ID NO:2, and a candidate heat and/or drought-tolerance sequence. A candidate sequence typically has a length that is from 80 percent to 200 percent of the length of the reference sequence, e.g., 82, 85, 87, 89, 90, 93, 95, 97, 99, 100, 105, 110, 115, 120, 130, 140, 150, 160, 170, 180, 190, or 200 percent of the length of the reference sequence. A percent identity for any candidate nucleic acid or polypeptide relative to a reference nucleic acid or polypeptide can be determined as follows. A reference sequence (e.g., a nucleic acid sequence or an amino acid sequence) is aligned to one or more candidate sequences using the computer program ClustalW (version 1.83, default parameters), which allows alignments of nucleic acid or polypeptide sequences to be carried out across their entire length (global alignment). Chenna et al., Nucleic Acids Res., 31(13):3497-500 (2003).

[0116] ClustalW calculates the best match between a reference and one or more candidate sequences, and aligns them so that identities, similarities and differences can be determined. Gaps of one or more residues can be inserted into a reference sequence, a candidate sequence, or both, to maximize sequence alignments. For fast pairwise alignment of nucleic acid sequences, the following default parameters are used: word size: 2; window size: 4; scoring method: percentage; number of top diagonals: 4; and gap penalty: 5. For multiple alignment of nucleic acid sequences, the following parameters are used: gap opening penalty: 10.; gap extension penalty: 5.0; and weight transitions: yes. For fast pairwise alignment of protein sequences, the following parameters are used: word size: 1; window size: 5; scoring method: percentage; number of top diagonals: 5; gap penalty: 3. For multiple alignment of protein sequences, the following parameters are used: weight matrix: blosum; gap opening penalty: 10.; gap extension penalty: 0.5; hydrophilic gaps: on; hydrophilic residues: Gly, Pro, Ser, Asn, Asp, Gln, Glu, Arg, and Lys; residue-specific gap penalties: on. The ClustalW output is a sequence alignment that reflects the relationship between sequences. ClustalW can be run, for example, at the Baylor College of Medicine Search Launcher site (searchlauncher.bcm.tmc.edu/multi-align/multi-align.html) and at the European Bioinformatics Institute site on the World Wide Web (ebi.ac.uk/clustalw).

[0117] To determine percent identity of a candidate nucleic acid or amino acid sequence to a reference sequence, the sequences are aligned using ClustalW, the number of identical matches in the alignment is divided by the length of the reference sequence, and the result is multiplied by 100. It is noted that the percent identity value can be rounded to the nearest tenth. For example, 78.11, 78.12, 78.13, and 78.14 are rounded down to 78.1, while 78.15, 78.16, 78.17, 78.18, and 78.19 are rounded up to 78.2.

[0118] In some cases, a drought-tolerance polypeptide has an amino acid sequence with at least 40% sequence identity, e.g., 50%, 52%, 56%, 59%, 61%, 65%, 70%, 75%, 80%, 85%, 90%, 95%, 97%, 98%, or 99% sequence identity, to the amino acid sequence set forth in SEQ ID NO:442. Amino acid sequences of polypeptides having greater than 40% sequence identity to the polypeptide set forth in SEQ ID NO:442 are provided in FIG. 1. Such polypeptides include Public GI ID no. 72384401 (SEQ ID NO:443), Ceres CLONE ID no. 1079382 (SEQ ID NO:445), Ceres CLONE ID no. 1853461 (SEQ ID NO:447), Ceres CLONE ID no. 1626485 (SEQ ID NO:451), Ceres CLONE ID no. 1713920 (SEQ ID NO:459), Ceres CLONE ID no. 1772747 (SEQ ID NO:463), Ceres CLONE ID no. 225960 (SEQ ID NO:465), Public GI ID no. 115443807 (SEQ ID NO:470), and Ceres CLONE ID no. 569388 (SEQ ID NO:483).

[0119] In some cases, a drought-tolerance polypeptide has an amino acid sequence with at least 30% sequence identity, e.g., 30%, 35%, 40%, 48%, 50%, 52%, 56%, 59%, 61%, 65%, 70%, 75%, 80%, 85%, 90%, 95%, 97%, 98%, or 99% sequence identity, to the amino acid sequence set forth in SEQ ID NO:489. Amino acid sequences of polypeptides having greater than 30% sequence identity to the polypeptide set forth in SEQ ID NO:489 are provided in FIG. 2. Such polypeptides include Ceres CLONE ID no. 571200 (SEQ ID NO:494), Ceres CLONE ID no. 1928532 (SEQ ID NO:496), Ceres ANNOT ID no. 1490637 (SEQ ID NO:498), Ceres CLONE ID no. 295496 (SEQ ID NO:514), Public GI ID no. 115463637 (SEQ ID NO:515), and Ceres CLONE ID no. 1999444 (SEQ ID NO:518).

[0120] In some cases, a drought-tolerance polypeptide has an amino acid sequence with at least 35% sequence identity, e.g., 37%, 40%, 45%, 50%, 52%, 56%, 59%, 61%, 65%, 70%, 75%, 80%, 85%, 90%, 95%, 97%, 98%, or 99% sequence identity, to the amino acid sequence set forth in SEQ ID NO:568. Amino acid sequences of polypeptides having greater than 35% sequence identity to the polypeptide set forth in SEQ ID NO:568 are provided in FIG. 3. Such polypeptides include Ceres CLONE ID no. 695006 (SEQ ID NO:578) and Ceres ANNOT ID no. 1527488 (SEQ ID NO:584).

[0121] In some cases, a drought-tolerance polypeptide has an amino acid sequence with at least 25% sequence identity, e.g., 28%, 32%, 40%, 44%, 48%, 50%, 52%, 56%, 59%, 61%, 65%, 70%, 75%, 80%, 85%, 90%, 95%, 97%, 98%, or 99% sequence identity, to the amino acid sequence set forth in SEQ ID NO:590. Amino acid sequences of polypeptides having greater than 25% sequence identity to the polypeptide set forth in SEQ ID NO:590 are provided in FIG. 4. Such polypeptides include Ceres ANNOT ID no. 1501305 (SEQ ID NO:623), Ceres CLONE ID no. 607280 (SEQ ID NO:627), Public GI ID no. 92887174 (SEQ ID NO:632), Ceres CLONE ID no. 1857162 (SEQ ID NO:634), Public GI ID no. 115477272 (SEQ ID NO:674), and Ceres CLONE ID no. 264002 (SEQ ID NO:682).

[0122] In some cases, a drought-tolerance polypeptide has an amino acid sequence with at least 40% sequence identity, e.g., 50%, 52%, 56%, 59%, 61%, 65%, 70%, 75%, 80%, 85%, 90%, 95%, 97%, 98%, or 99% sequence identity, to the amino acid sequence set forth in SEQ ID NO:705. Amino acid sequences of polypeptides having greater than 40% sequence identity to the polypeptide set forth in SEQ ID NO:705 are provided in FIG. 5. Such polypeptides include Public GI ID no. 79320952 (SEQ ID NO:706) and Public GI ID no. 79320957 (SEQ ID NO:707).

[0123] In some cases, a drought-tolerance polypeptide has an amino acid sequence with at least 30% sequence identity, e.g., 33%, 41%, 45%, 50%, 52%, 56%, 59%, 61%, 65%, 70%, 75%, 80%, 85%, 90%, 95%, 97%, 98%, or 99% sequence identity, to the amino acid sequence set forth in SEQ ID NO:711. Amino acid sequences of polypeptides having greater than 30% sequence identity to the polypeptide set forth in SEQ ID NO:711 are provided in FIG. 6. Such polypeptides include Ceres CLONE ID no. 964616 (SEQ ID NO:714), Ceres CLONE ID no. 100009667 (SEQ ID NO:715), Ceres ANNOT ID no. 1444568 (SEQ ID NO:719), Ceres CLONE ID no. 719489 (SEQ ID NO:725), Ceres CLONE ID no. 587748 (SEQ ID NO:733), Public GI ID no. 125528114 (SEQ ID NO:734), and Ceres CLONE ID no. 274172 (SEQ ID NO:737).

[0124] In some cases, a drought-tolerance polypeptide has an amino acid sequence with at least 30% sequence identity, e.g., 35%, 38%, 43%, 47%, 50%, 52%, 56%, 59%, 61%, 65%, 70%, 75%, 80%, 85%, 90%, 95%, 97%, 98%, or 99% sequence identity, to the amino acid sequence set forth in SEQ ID NO:742. Amino acid sequences of polypeptides having greater than 30% sequence identity to the polypeptide set forth in SEQ ID NO:742 are provided in FIG. 7. Such polypeptides include Public GI ID no. 115477170 (SEQ ID NO:757), Ceres CLONE ID no. 1620215 (SEQ ID NO:759), Ceres CLONE ID no. 1931889 (SEQ ID NO:761), Ceres ANNOT ID no. 1460527 (SEQ ID NO:801), Ceres CLONE ID no. 975913 (SEQ ID NO:846), Ceres CLONE ID no. 708446 (SEQ ID NO:859), Ceres CLONE ID no. 1748922 (SEQ ID NO:944), Ceres CLONE ID no. 1775820 (SEQ ID NO:955), Public GI ID no. 115468934 (SEQ ID NO:991), and Public GI ID no. 118424243 (SEQ ID NO:1000).

[0125] In some cases, a drought-tolerance polypeptide has an amino acid sequence with at least 35% sequence identity, e.g., 36%, 40%, 47%, 50%, 52%, 56%, 59%, 61%, 65%, 70%, 75%, 80%, 85%, 90%, 95%, 97%, 98%, or 99% sequence identity, to the amino acid sequence set forth in SEQ ID NO:1012. Amino acid sequences of polypeptides having greater than 35% sequence identity to the polypeptide set forth in SEQ ID NO:1012 are provided in FIG. 8. Such polypeptides include Ceres CLONE ID no. 287430 (SEQ ID NO:1018), Ceres ANNOT ID no. 451889 (SEQ ID NO:1020), Ceres CLONE ID no. 936084 (SEQ ID NO:1055), Ceres CLONE ID no. 1792501 (SEQ ID NO:1066), Ceres ANNOT ID no. 1437875 (SEQ ID NO:1068), Public GI ID no. 1853968 (SEQ ID NO:1093), Public GI ID no. 27530032 (SEQ ID NO:1094), Ceres CLONE ID no. 1834483 (SEQ ID NO:1110), Public GI ID no. 84579418 (SEQ ID NO:1113), Public GI ID no. 15077030 (SEQ ID NO:1117), and Public GI ID no. 13752458 (SEQ ID NO:1118).

[0126] In some cases, a drought-tolerance polypeptide has an amino acid sequence with at least 30% sequence identity, e.g., 31%, 35%, 40%, 41%, 49%, 50%, 52%, 56%, 59%, 61%, 65%, 70%, 75%, 80%, 85%, 90%, 95%, 97%, 98%, or 99% sequence identity, to the amino acid sequence set forth in SEQ ID NO:1129. Amino acid sequences of polypeptides having greater than 30% sequence identity to the polypeptide set forth in SEQ ID NO:1129 are provided in FIG. 9. Such polypeptides include Public GI ID no. 72255610 (SEQ ID NO:933), Ceres SEEDLINE ID no. ME20095 (SEQ ID NO:1129), Ceres CLONE ID no. 1562633 (SEQ ID NO:1140), Ceres ANNOT ID no. 1692728 (SEQ ID NO:1142), Ceres CLONE ID no. 921110 (SEQ ID NO:1144), Ceres CLONE ID no. 1791180 (SEQ ID NO:1146), Ceres CLONE ID no. 527891 (SEQ ID NO:1148), Ceres ANNOT ID no. 1522414 (SEQ ID NO:1150), and Public GI ID no. 51458330 (SEQ ID NO:1182).

[0127] In some cases, a heat-tolerance polypeptide has an amino acid sequence with at least 25% sequence identity, e.g., 26%, 27%, 30%, 32%, 40%, 42%, 47%, 50%, 52%, 56%, 59%, 61%, 65%, 70%, 75%, 80%, 85%, 90%, 95%, 97%, 98%, or 99% sequence identity, to the amino acid sequence set forth in SEQ ID NO:60. Amino acid sequences of polypeptides having greater than 25% sequence identity to the polypeptide set forth in SEQ ID NO:60 are provided in FIG. 10. Such polypeptides include Ceres CLONE ID no. 872030 (SEQ ID NO:62), Ceres CLONE ID no. 100029223 (SEQ ID NO:74), Ceres CLONE ID no. 1939845 (SEQ ID NO:98), Ceres CLONE ID no. 2015383 (SEQ ID NO:102), Ceres CLONE ID no. 1607893 (SEQ ID NO:104), Ceres CLONE ID no. 1075133 (SEQ ID NO:152), and Ceres CLONE ID no. 1218065 (SEQ ID NO:915).

[0128] In some cases, a heat-tolerance polypeptide has an amino acid sequence with at least 25% sequence identity, e.g., 27%, 28%, 31%, 36%, 44%, 50%, 52%, 56%, 59%, 61%, 65%, 70%, 75%, 80%, 85%, 90%, 95%, 97%, 98%, or 99% sequence identity, to the amino acid sequence set forth in SEQ ID NO:364. Amino acid sequences of polypeptides having greater than 25% sequence identity to the polypeptide set forth in SEQ ID NO:364 are provided in FIG. 11. Such polypeptides include Ceres ANNOT ID no. 1455221 (SEQ ID NO:407), Public GI ID no. 729774 (SEQ ID NO:408), Ceres CLONE ID no. 1414288 (SEQ ID NO:410), Public GI ID no. 115482048 (SEQ ID NO:413), and Public GI ID no. 56117815 (SEQ ID NO:421).

[0129] In some cases, a heat-tolerance polypeptide has an amino acid sequence with at least 25% sequence identity, e.g., 29%, 35%, 40%, 47%, 50%, 52%, 56%, 59%, 61%, 65%, 70%, 75%, 80%, 85%, 90%, 95%, 97%, 98%, or 99% sequence identity, to the amino acid sequence set forth in SEQ ID NO:311. Amino acid sequences of polypeptides having greater than 25% sequence identity to the polypeptide set forth in SEQ ID NO:311 are provided in FIG. 12. Such polypeptides include Ceres ANNOT ID no. 1538958 (SEQ ID NO:319), Public GI ID no. 115521213 (SEQ ID NO:320), Public GI ID no. 42415865 (SEQ ID NO:321), Public GI ID no. 729775 (SEQ ID NO:322), Public GI ID no. 11386827 (SEQ ID NO:323), Public GI ID no. 115456675 (SEQ ID NO:326), and Public GI ID no. 89274218 (SEQ ID NO:335).

[0130] In some cases, a heat-tolerance polypeptide has an amino acid sequence with at least 25% sequence identity, e.g., 30%, 33%, 40%, 45%, 50%, 52%, 56%, 59%, 61%, 65%, 70%, 75%, 80%, 85%, 90%, 95%, 97%, 98%, or 99% sequence identity, to the amino acid sequence set forth in SEQ ID NO:160. Amino acid sequences of polypeptides having greater than 25% sequence identity to the polypeptide set forth in SEQ ID NO:160 are provided in FIG. 13. Such polypeptides include Ceres CLONE ID no. 1837065 (SEQ ID NO:162), Ceres ANNOT ID no. 1531178 (SEQ ID NO:184), Ceres CLONE ID no. 470694 (SEQ ID NO:242), Public GI ID no. 92867368 (SEQ ID NO:253), Ceres CLONE ID no. 859707 (SEQ ID NO:256), Ceres CLONE ID no. 392275 (SEQ ID NO:268), Ceres CLONE ID no. 1828394 (SEQ ID NO:282), and Public GI ID no. 115466694 (SEQ ID NO:294).

[0131] In some cases, a heat-tolerance polypeptide has an amino acid sequence with at least 20% sequence identity, e.g., 21%, 22%, 30%, 35%, 40%, 45%, 50%, 52%, 56%, 59%, 61%, 65%, 70%, 75%, 80%, 85%, 90%, 95%, 97%, 98%, or 99% sequence identity, to the amino acid sequence set forth in SEQ ID NO:2. Amino acid sequences of polypeptides having greater than 20% sequence identity to the polypeptide set forth in SEQ ID NO:2 are provided in FIG. 14. Such polypeptides include Public GI ID no. 115470807 (SEQ ID NO:5), Ceres CLONE ID no. 1842931 (SEQ ID NO:15), Ceres CLONE ID no. 321308 (SEQ ID NO:17), Ceres CLONE ID no. 1725811 (SEQ ID NO:19), Ceres CLONE ID no. 1357455 (SEQ ID NO:21), Ceres CLONE ID no. 943370 (SEQ ID NO:23), Ceres CLONE ID no. 1327712 (SEQ ID NO:25), Ceres CLONE ID no. 1764692 (SEQ ID NO:27), and Ceres ANNOT ID no. 1512656 (SEQ ID NO:41).

[0132] In some cases, a drought-tolerance polypeptide has an amino acid sequence with at least 20% sequence identity, e.g., 22%, 23%, 30%, 35%, 40%, 50%, 52%, 56%, 59%, 61%, 65%, 70%, 75%, 80%, 85%, 90%, 95%, 97%, 98%, or 99% sequence identity, to the amino acid sequence set forth in SEQ ID NO:749. Amino acid sequences of polypeptides having greater than 20% sequence identity to the polypeptide set forth in SEQ ID NO:749 are provided in FIG. 15. Such polypeptides include Ceres CLONE ID no. 1847516 (SEQ ID NO:1195), Ceres CLONE ID no. 1961986 (SEQ ID NO:1201), and Ceres ANNOT ID no. 6091930 (SEQ ID NO:1207).

[0133] In some cases, a drought-tolerance polypeptide has an amino acid sequence with at least 30% sequence identity, e.g., 31%, 35%, 40%, 41%, 49%, 50%, 52%, 56%, 59%, 61%, 65%, 70%, 75%, 80%, 85%, 90%, 95%, 97%, 98%, or 99% sequence identity, to the amino acid sequence set forth in SEQ ID NO:1311. Amino acid sequences of polypeptides having greater than 30% sequence identity to the polypeptide set forth in SEQ ID NO:1311 are provided in FIG. 16. Such polypeptides include CeresClone: 971761 (SEQ ID NO: 1313), CeresClone: 1946574 (SEQ ID NO: 1331), CeresClone: 2055551 (SEQ ID NO: 1340), CeresClone: 100045499 (SEQ ID NO: 1347), CeresClone: 1465853 (SEQ ID NO: 1353), CeresClone: 753982 (SEQ ID NO: 1360), CeresClone: 1076093 (SEQ ID NO: 1315), CeresClone: 1627875 (SEQ ID NO: 1317), CeresAnnot: 1508362 (SEQ ID NO: 1319), CeresAnnot: 1526950 (SEQ ID NO: 1321), CeresClone: 1832333 (SEQ ID NO: 1323), GI: 74272607 (SEQ ID NO: 1324), GI: 192910782 (SEQ ID NO: 1325), GI: 157342563 (SEQ ID NO: 1326), GI: 159483497 (SEQ ID NO: 1327), CeresClone: 1839999 (SEQ ID NO: 1329), CeresClone: 467335 (SEQ ID NO: 1333), GI: 168010087 (SEQ ID NO: 1334), CeresClone: 1728202 (SEQ ID NO: 1336), CeresClone: 1994239 (SEQ ID NO: 1338), CeresAnnot: 8704704 (SEQ ID NO: 1342), GI: 115453877 (SEQ ID NO: 1343), CeresClone: 1646411 (SEQ ID NO: 1345), CeresClone: 100920260 (SEQ ID NO: 1349), GI: 116786147 (SEQ ID NO: 1350), GI: 116783944 (SEQ ID NO: 1351), GI: 82623397 (SEQ ID NO: 1354), CeresAnnot: 8656662 (SEQ ID NO: 1356), CeresClone: 1417803 (SEQ ID NO: 1358), and GI: 145345927 (SEQ ID NO: 1361).

[0134] E. Other Sequences

[0135] It should be appreciated that a heat and/or drought-tolerance polypeptide can include additional amino acids that are not involved in heat and/or drought-tolerance, and thus such a polypeptide can be longer than would otherwise be the case. For example, a heat and/or drought-tolerance polypeptide can include a purification tag, a chloroplast transit peptide, a mitochondrial transit peptide, an amyloplast peptide, or a leader sequence added to the amino or carboxy terminus. In some embodiments, a heat and/or drought-tolerance polypeptide includes an amino acid sequence that functions as a reporter, e.g., a green fluorescent protein or yellow fluorescent protein.

### III. NUCLEIC ACIDS

[0136] Nucleic acids described herein include nucleic acids that are effective to increase heat and/or drought tolerance when transcribed in a plant or plant cell. Such nucleic acids include those that encode a heat and/or drought-tolerance polypeptide.

[0137] A. Nucleic Acids Encoding Heat and/or Drought-Tolerance Polypeptides

[0138] Nucleic acids encoding heat and/or drought-tolerance polypeptides are described herein. Such nucleic acids include SEQ ID NO:441, SEQ ID NO:488, SEQ ID NO:567, SEQ ID NO:589, SEQ ID NO:703, SEQ ID NO:704, SEQ ID NO:710, SEQ ID NO:1241, SEQ ID NO:1260, SEQ ID NO:1126, SEQ ID NO:1127, SEQ ID NO:1128, SEQ ID NO:58, SEQ ID NO:59, SEQ ID NO:363, SEQ ID NO:310, SEQ ID NO:159, SEQ ID NO:1, SEQ ID NO:1188, SEQ ID NO:1311, and SEQ ID NO:56, as described in more detail below. A nucleic acid also can be a fragment that is at least 40% (e.g., at least 45, 50, 55, 60, 65, 70, 75, 80, 85, 90, 95, or 99%) of the length of the full-length nucleic acid set forth in SEQ ID NO:441, SEQ ID NO:488, SEQ ID NO:567, SEQ ID NO:589, SEQ ID NO:703, SEQ ID NO:704, SEQ ID NO:710, SEQ ID NO:1241, SEQ ID NO:1260, SEQ ID NO:1126, SEQ ID NO:1127, SEQ ID NO:1128, SEQ ID NO:58, SEQ ID NO:59, SEQ ID NO:363, SEQ ID NO:310, SEQ ID NO:159, SEQ ID NO:1, SEQ ID NO:1008, and SEQ ID NO:56.

[0139] A drought-tolerance nucleic acid can comprise the nucleotide sequence set forth in SEQ ID NO:441. Alternatively, a drought-tolerance nucleic acid can be a variant of the nucleic acid having the nucleotide sequence set forth in SEQ ID NO:441. For example, a drought-tolerance nucleic acid can have a nucleotide sequence with at least 80% sequence identity, e.g., 81%, 85%, 90%, 95%, 97%, 98%, or 99% sequence identity, to the nucleotide sequence set forth in SEQ ID NO:441 or a functional homolog thereof such as those identified in the sequence listing.

[0140] A drought-tolerance nucleic acid can comprise the nucleotide sequence set forth in SEQ ID NO:488. Alternatively, a drought-tolerance nucleic acid can be a variant of the nucleic acid having the nucleotide sequence set forth in SEQ ID NO:488. For example, a drought-tolerance nucleic acid can have a nucleotide sequence with at least 80% sequence identity, e.g., 81%, 85%, 90%, 95%, 97%, 98%, or 99% sequence identity, to the nucleotide sequence set forth in SEQ ID NO:488 or a functional homolog thereof such as those identified in the sequence listing.

[0141] A drought-tolerance nucleic acid can comprise the nucleotide sequence set forth in SEQ ID NO:567. Alternatively, a drought-tolerance nucleic acid can be a variant of the nucleic acid having the nucleotide sequence set forth in SEQ ID NO:567. For example, a drought-tolerance nucleic acid can have a nucleotide sequence with at least 80% sequence identity, e.g., 81%, 85%, 90%, 95%, 97%, 98%, or 99% sequence identity, to the nucleotide sequence set forth in SEQ ID NO:567 or a functional homolog thereof such as those identified in the sequence listing.

[0142] A drought-tolerance nucleic acid can comprise the nucleotide sequence set forth in SEQ ID NO:589. Alternatively, a drought-tolerance nucleic acid can be a variant of the nucleic acid having the nucleotide sequence set forth in SEQ ID NO:589. For example, a drought-tolerance nucleic acid can have a nucleotide sequence with at least 80% sequence identity, e.g., 81%, 85%, 90%, 95%, 97%, 98%, or 99% sequence identity, to the nucleotide sequence set forth in SEQ ID NO:589 or a functional homolog thereof such as those identified in the sequence listing.

[0143] A drought-tolerance nucleic acid can comprise the nucleotide sequence set forth in SEQ ID NO:703. Alternatively, a drought-tolerance nucleic acid can be a variant of the nucleic acid having the nucleotide sequence set forth in SEQ ID NO:703. For example, a drought-tolerance nucleic acid can have a nucleotide sequence with at least 80% sequence identity, e.g., 81%, 85%, 90%, 95%, 97%, 98%, or 99% sequence identity, to the nucleotide sequence set forth in SEQ ID NO:703 or a functional homolog thereof such as those identified in the sequence listing.

[0144] A drought-tolerance nucleic acid can comprise the nucleotide sequence set forth in SEQ ID NO:710. Alternatively, a drought-tolerance nucleic acid can be a variant of the nucleic acid having the nucleotide sequence set forth in SEQ ID NO:710. For example, a drought-tolerance nucleic acid can have a nucleotide sequence with at least 80% sequence identity, e.g., 81%, 85%, 90%, 95%, 97%, 98%, or 99% sequence identity, to the nucleotide sequence set forth in SEQ ID NO:710 or a functional homolog thereof such as those identified in the sequence listing.

[0145] A drought-tolerance nucleic acid can comprise the nucleotide sequence set forth in SEQ ID NO:1241. Alternatively, a drought-tolerance nucleic acid can be a variant of the nucleic acid having the nucleotide sequence set forth in SEQ ID NO:1241. For example, a drought-tolerance nucleic acid can have a nucleotide sequence with at least 80% sequence identity, e.g., 81%, 85%, 90%, 95%, 97%, 98%, or 99% sequence identity, to the nucleotide sequence set forth in SEQ ID NO:1241 or a functional homolog thereof such as those identified in the sequence listing.

[0146] A drought-tolerance nucleic acid can comprise the nucleotide sequence set forth in SEQ ID NO:1260. Alternatively, a drought-tolerance nucleic acid can be a variant of the nucleic acid having the nucleotide sequence set forth in SEQ ID NO:1260. For example, a drought-tolerance nucleic acid can have a nucleotide sequence with at least 80% sequence identity, e.g., 81%, 85%, 90%, 95%, 97%, 98%, or 99% sequence identity, to the nucleotide sequence set forth in SEQ ID NO:1260 or a functional homolog thereof such as those identified in the sequence listing.

[0147] A drought-tolerance nucleic acid can comprise the nucleotide sequence set forth in SEQ ID NO:1126. Alternatively, a drought-tolerance nucleic acid can be a variant of the nucleic acid having the nucleotide sequence set forth in SEQ ID NO:1126. For example, a drought-tolerance nucleic acid can have a nucleotide sequence with at least 80% sequence identity, e.g., 81%, 85%, 90%, 95%, 97%, 98%, or 99% sequence identity, to the nucleotide sequence set forth in SEQ ID NO:1126 or a functional homolog thereof such as those identified in the sequence listing.

[0148] A heat-tolerance nucleic acid can comprise the nucleotide sequence set forth in SEQ ID NO:58. Alternatively, a heat-tolerance nucleic acid can be a variant of the nucleic acid having the nucleotide sequence set forth in SEQ ID NO:58. For example, a heat-tolerance nucleic acid can have a nucleotide sequence with at least 80% sequence identity, e.g., 81%, 85%, 90%, 95%, 97%, 98%, or 99% sequence identity, to the nucleotide sequence set forth in SEQ ID NO:58 or a functional homolog thereof such as those identified in the sequence listing.

[0149] A heat-tolerance nucleic acid can comprise the nucleotide sequence set forth in SEQ ID NO:363. Alternatively, a heat-tolerance nucleic acid can be a variant of the nucleic acid having the nucleotide sequence set forth in SEQ ID NO:363. For example, a heat-tolerance nucleic acid can have a nucleotide sequence with at least 80% sequence identity, e.g., 81%, 85%, 90%, 95%, 97%, 98%, or 99% sequence identity, to the nucleotide sequence set forth in SEQ ID NO:363 or a functional homolog thereof such as those identified in the sequence listing.

[0150] A heat-tolerance nucleic acid can comprise the nucleotide sequence set forth in SEQ ID NO:310. Alternatively, a heat-tolerance nucleic acid can be a variant of the nucleic acid having the nucleotide sequence set forth in SEQ ID NO:310. For example, a heat-tolerance nucleic acid can have a nucleotide sequence with at least 80% sequence identity, e.g., 81%, 85%, 90%, 95%, 97%, 98%, or 99% sequence identity, to the nucleotide sequence set forth in SEQ ID NO:310 or a functional homolog thereof such as those identified in the sequence listing.

[0151] A heat-tolerance nucleic acid can comprise the nucleotide sequence set forth in SEQ ID NO:159. Alternatively, a heat-tolerance nucleic acid can be a variant of the nucleic acid having the nucleotide sequence set forth in SEQ ID NO:159. For example, a heat-tolerance nucleic acid can have a nucleotide sequence with at least 80% sequence identity, e.g., 81%, 85%, 90%, 95%, 97%, 98%, or 99% sequence identity, to the nucleotide sequence set forth in SEQ ID NO:159 or a functional homolog thereof such as those identified in the sequence listing.

[0152] A heat-tolerance nucleic acid can comprise the nucleotide sequence set forth in SEQ ID NO:1. Alternatively, a heat-tolerance nucleic acid can be a variant of the nucleic acid having the nucleotide sequence set forth in SEQ ID NO:1. For example, a heat-tolerance nucleic acid can have a nucleotide sequence with at least 80% sequence identity, e.g., 81%, 85%, 90%, 95%, 97%, 98%, or 99% sequence identity, to the nucleotide sequence set forth in SEQ ID NO:1 or a functional homolog thereof such as those identified in the sequence listing.

[0153] A drought-tolerance nucleic acid can comprise the nucleotide sequence set forth in SEQ ID NO:1008. Alternatively, a drought-tolerance nucleic acid can be a variant of the nucleic acid having the nucleotide sequence set forth in SEQ ID NO:1008. For example, a drought-tolerance nucleic acid can have a nucleotide sequence with at least 80% sequence identity, e.g., 81%, 85%, 90%, 95%, 97%, 98%, or 99% sequence identity, to the nucleotide sequence set forth in SEQ ID NO:1008 or a functional homolog thereof such as those identified in the sequence listing.

[0154] A heat-tolerance nucleic acid can comprise the nucleotide sequence set forth in SEQ ID NO:56. Alternatively, a heat-tolerance nucleic acid can be a variant of the nucleic acid having the nucleotide sequence set forth in SEQ ID NO:56. For example, a heat-tolerance nucleic acid can have a nucleotide sequence with at least 80% sequence identity, e.g., 81%, 85%, 90%, 95%, 97%, 98%, or 99% sequence identity, to the nucleotide sequence set forth in SEQ ID NO:56.

[0155] A drought-tolerance nucleic acid can comprise the nucleotide sequence set forth in SEQ ID NO:1362. Alternatively, a drought-tolerance nucleic acid can be a variant of the nucleic acid having the nucleotide sequence set forth in SEQ ID NO:1362. For example, a drought-tolerance nucleic acid can have a nucleotide sequence with at least 30% sequence identity, e.g., 35%, 40%, 45%, 50%, 55%, 60%, 65%, 70%, 75%, 80%, 85%, 90%, 95%, 97%, 98%, or 99% sequence identity, to the nucleotide sequence set forth in SEQ ID NO:1362 or a functional homolog thereof such as those identified in the sequence listing.

[0156] Isolated nucleic acid molecules can be produced by standard techniques. For example, polymerase chain reaction (PCR) techniques can be used to obtain an isolated nucleic acid containing a nucleotide sequence described herein. PCR can be used to amplify specific sequences from DNA as well as RNA, including sequences from total genomic DNA or total cellular RNA. Various PCR methods are described, for example, in PCR Primer: A Laboratory Manual, Dieffenbach and Dveksler, eds., Cold Spring Harbor Laboratory Press, 1995. Generally, sequence information from the ends of the region of interest or beyond is employed to design oligonucleotide primers that are identical or similar in sequence to opposite strands of the template to be amplified. Various PCR strategies also are available by which site-specific nucleotide sequence modifications can be introduced into a template nucleic acid. Isolated nucleic acids also can be chemically synthesized, either as a single nucleic acid molecule (e.g., using automated DNA synthesis in the 3′ to 5′ direction using phosphoramidite technology) or as a series of oligonucleotides. For example, one or more pairs of long oligonucleotides (e.g., >100 nucleotides) can be synthesized that contain the desired sequence, with each pair containing a short segment of complementarity (e.g., about 15 nucleotides) such that a duplex is formed when the oligonucleotide pair is annealed. DNA polymerase is used to extend the oligonucleotides, resulting in a single, double-stranded nucleic acid molecule per oligonucleotide pair, which then can be ligated into a vector. Isolated nucleic acids of the invention also can be obtained by mutagenesis of, e.g., a naturally occurring DNA.

[0157] B. Use of Nucleic Acids to Modulate Expression of Polypeptides

Expression of a Heat and/or Drought-Tolerance Polypeptide

[0158] A nucleic acid encoding one of the heat and/or drought-tolerance polypeptides described herein can be used to express the polypeptide in a plant species of interest, typically by transforming a plant cell with a nucleic acid having the coding sequence for the polypeptide operably linked in sense orientation to one or more regulatory regions. Suitable polynucleotides include full-length nucleic acids encoding heat and/or drought-tolerance polypeptides or fragments of such full-length nucleic acids. In some embodiments, a complement of the full-length nucleic acid or a fragment thereof can be used. Typically, a fragment is at least 50 nucleotides, e.g., at least 50, 55, 60, 75, 100, 200, 300, 500, 600, 700, 1000, 2000 nucleotides or more.

[0159] It will be appreciated that because of the degeneracy of the genetic code, a number of nucleic acids can encode a particular heat and/or drought-tolerance polypeptide; i.e., for many amino acids, there is more than one nucleotide triplet that serves as the codon for the amino acid. Thus, codons in the coding sequence for a given heat and/or drought-tolerance polypeptide can be modified such that optimal expression in a particular plant species is obtained, using appropriate codon bias tables for that species.

[0160] In some cases, expression of a heat and/or drought-tolerance polypeptide inhibits one or more functions of an endogenous polypeptide. For example, a nucleic acid that encodes a dominant negative polypeptide can be used to inhibit protein function. A dominant negative polypeptide typically is mutated or truncated relative to an endogenous wild type polypeptide, and its presence in a cell inhibits one or more functions of the wild type polypeptide in that cell, i.e., the dominant negative polypeptide is genetically dominant and confers a loss of function. The mechanism by which a dominant negative polypeptide confers such a phenotype can vary but often involves a protein-protein interaction or a protein-DNA interaction. For example, a dominant negative polypeptide can be an enzyme that is truncated relative to a native wild type enzyme, such that the truncated polypeptide retains domains involved in binding a first protein but lacks domains involved in binding a second protein. The truncated polypeptide is thus unable to properly modulate the activity of the second protein. See, e.g., US 2007/0056058. As another example, a point mutation that results in a non-conservative amino acid substitution in a catalytic domain can result in a dominant negative polypeptide. See, e.g., US 2005/032221. As another example, a dominant negative polypeptide can be a transcription factor that is truncated relative to a native wild type transcription factor, such that the truncated polypeptide retains the DNA binding domain(s) but lacks the activation domain(s). Such a truncated polypeptide can inhibit the wild type transcription factor from binding DNA, thereby inhibiting transcription activation.

[0161] C. Constructs/Vectors

[0162] Recombinant constructs provided herein can be used to transform plants or plant cells in order to increase drought and/or heat tolerance. A recombinant nucleic acid construct can comprise a nucleic acid encoding a heat and/or drought-tolerance polypeptide as described herein, operably linked to a regulatory region suitable for expressing the heat and/or drought-tolerance polypeptide in the plant or cell. Thus, a nucleic acid can comprise a coding sequence that encodes any of the heat and/or drought-tolerance polypeptides as set forth in SEQ ID NO: 2, 3, 4, 5, 6, 7, 8, 9, 10, 11, 13, 15, 17, 19, 21, 23, 25, 27, 29, 31, 33, 35, 37, 39, 41, 43, 45, 47, 49, 51, 53, 55, 57, 60, 62, 63, 64, 65, 66, 67, 68, 69, 70, 71, 73, 74, 76, 78, 80, 82, 84, 86, 88, 90, 92, 94, 96, 98, 100, 102, 104, 106, 108, 110, 112, 114, 116, 118, 120, 122, 124, 126, 127, 130, 132, 134, 136, 138, 139, 142, 144, 146, 148, 150, 152, 154, 156, 158, 160, 162, 164, 166, 168, 170, 172, 174, 176, 178, 179, 180, 182, 184, 186, 188, 190, 192, 194, 196, 198, 200, 202, 204, 206, 208, 209, 212, 214, 216, 218, 220, 222, 224, 225, 228, 229, 231, 233, 234, 235, 237, 239, 240, 242, 244, 246, 248, 250, 252, 253, 254, 256, 258, 260, 262, 264, 266, 268, 269, 271, 273, 275, 277, 279, 280, 282, 284, 286, 288, 289, 290, 291, 292, 293, 294, 295, 296, 297, 298, 299, 300, 301, 302, 303, 304, 305, 307, 309, 311, 312, 314, 315, 316, 317, 319, 320, 321, 322, 323, 325, 326, 327, 329, 330, 332, 334, 335, 336, 337, 338, 339, 340, 341, 343, 344, 346, 348, 349, 350, 351, 353, 355, 356, 358, 360, 362, 364, 366, 368, 369, 370, 371, 373, 375, 377, 379, 381, 383, 385, 387, 389, 390, 392, 394, 396, 398, 400, 401, 402, 404, 405, 407, 408, 410, 412, 413, 414, 416, 418, 419, 420, 421, 422, 423, 424, 426, 428, 430, 431, 432, 433, 434, 435, 436, 438, 440, 442, 443, 445, 447, 449, 451, 453, 455, 457, 459, 461, 463, 465, 467, 469, 470, 472, 474, 476, 478, 480, 481, 483, 485, 487, 489, 490, 491, 492, 494, 496, 498, 500, 502, 504, 506, 508, 510, 512, 514, 515, 516, 518, 519, 520, 522, 524, 526, 528, 530, 531, 533, 535, 536, 538, 540, 541, 543, 545, 547, 548, 550, 552, 553, 555, 557, 558, 559, 561, 562, 564, 566, 568, 569, 570, 572, 574, 576, 578, 580, 582, 584, 586, 588, 590, 591, 592, 593, 594, 595, 596, 597, 598, 599, 600, 602, 603, 604, 605, 607, 608, 610, 612, 614, 615, 616, 617, 618, 619, 620, 621, 623, 625, 627, 629, 631, 632, 634, 635, 636, 638, 640, 642, 644, 646, 647, 648, 650, 651, 653, 654, 655, 656, 658, 660, 661, 662, 663, 664, 665, 666, 667, 668, 669, 671, 673, 674, 675, 676, 678, 680, 682, 684, 685, 687, 688, 690, 691, 692, 694, 696, 698, 700, 702, 705, 706, 707, 708, 709, 711, 712, 714, 715, 717, 719, 721, 723, 725, 726, 727, 729, 731, 733, 734, 735, 737, 738, 740, 741, 742, 743, 744, 745, 746, 747, 748, 749, 751, 752, 753, 754, 755, 756, 757, 759, 760, 761, 763, 765, 767, 768, 769, 771, 773, 774, 775, 777, 779, 781, 783, 785, 787, 789, 791, 793, 795, 796, 797, 798, 799, 801, 803, 805, 807, 808, 809, 810, 811, 812, 813, 815, 816, 817, 819, 821, 823, 825, 827, 829, 832, 834, 836, 839, 840, 841, 842, 843, 844, 845, 846, 848, 849, 850, 851, 852, 853, 854, 856, 857, 859, 861, 863, 865, 867, 869, 870, 871, 872, 873, 874, 876, 878, 880, 882, 885, 886, 887, 888, 889, 890, 891, 892, 893, 894, 896, 897, 898, 900, 901, 902, 904, 906, 908, 910, 912, 913, 914, 915, 916, 918, 920, 922, 924, 926, 929, 931, 932, 933, 935, 937, 939, 941, 943, 944, 945, 947, 949, 951, 952, 953, 955, 957, 958, 959, 960, 961, 962, 963, 964, 966, 968, 969, 970, 971, 973, 974, 975, 977, 978, 979, 980, 981, 983, 985, 987, 988, 989, 990, 991, 992, 993, 995, 997, 998, 999, 1000, 1001, 1003, 1005, 1007, 1010, 1012, 1013, 1014, 1015, 1016, 1018, 1020, 1022, 1023, 1025, 1027, 1028, 1030, 1031, 1033, 1035, 1037, 1039, 1041, 1043, 1045, 1046, 1048, 1050, 1051, 1053, 1055, 1056, 1058, 1059, 1061, 1062, 1064, 1066, 1068, 1069, 1071, 1073, 1075, 1077, 1079, 1080, 1082, 1084, 1086, 1088, 1090, 1092, 1093, 1094, 1096, 1098, 1100, 1102, 1104, 1106, 1108, 1110, 1112, 1113, 1114, 1116, 1117, 1118, 1119, 1121, 1123, 1125, 1129, 1130, 1131, 1132, 1133, 1134, 1135, 1136, 1137, 1138, 1140, 1142, 1144, 1146, 1148, 1150, 1151, 1152, 1153, 1154, 1156, 1157, 1158, 1159, 1160, 1161, 1162, 1164, 1166, 1168, 1170, 1172, 1174, 1175, 1177, 1179, 1181, 1182, 1184, 1186, 1188, 1189, 1191, 1193, 1195, 1197, 1199, 1201, 1203, 1205, 1207, 1209, 1210, 1212, 1214, 1215, 1216, 1218, 1219, 1221, 1222, 1223, 1225, 1226, 1228, 1230, 1231, 1232, 1234, 1236, 1238, 1240, 1242, 1244, 1246, 1248, 1250, 1252, 1254, 1256, 1258, 1262, 1264, 1265, 1267, 1269, 1271, 1273, 1274, 1276, 1277, 1279, 1281, 1283, 1285, 1286, 1287, 1288, 1290, 1292, 1293, 1294, 1296, 1298, 1300, 1302, 1304, 1305, 1311, 1313, 1315, 1317, 1319, 1321, 1323, 1324, 1325, 1326, 1327, 1329, 1331, 1333, 1334, 1336, 1338, 1340, 1342, 1343, 1345, 1347, 1349, 1350, 1351, 1353, 1354, 1356, 1358, 1360, or 1361. The heat and/or drought-tolerance polypeptide encoded by a recombinant nucleic acid can be a native heat and/or drought-tolerance polypeptide, or can be heterologous to the cell. Examples of suitable regulatory regions are described in the section entitled “Regulatory Regions.”

[0163] Vectors containing recombinant nucleic acid constructs such as those described herein also are provided. Suitable vector backbones include, for example, those routinely used in the art such as plasmids, viruses, artificial chromosomes, BACs, YACs, or PACs. Suitable expression vectors include, without limitation, plasmids and viral vectors derived from, for example, bacteriophage, baculoviruses, and retroviruses. Numerous vectors and expression systems are commercially available from such corporations as Novagen (Madison, Wis.), Clontech (Palo Alto, Calif.), Stratagene (La Jolla, Calif.), and Invitrogen/Life Technologies (Carlsbad, Calif.).

[0164] The vectors provided herein also can include, for example, origins of replication, scaffold attachment regions (SARs), and/or markers. A marker gene can confer a selectable phenotype on a plant cell. For example, a marker can confer biocide resistance, such as resistance to an antibiotic (e.g., kanamycin, G418, bleomycin, or hygromycin), or an herbicide (e.g., glyphosate, chlorsulfuron or phosphinothricin). In addition, an expression vector can include a tag sequence designed to facilitate manipulation or detection (e.g., purification or localization) of the expressed polypeptide. Tag sequences, such as luciferase, β-glucuronidase (GUS), green fluorescent protein (GFP), glutathione S-transferase (GST), polyhistidine, c-myc, hemagglutinin, or Flag™ tag (Kodak, New Haven, Conn.) sequences typically are expressed as a fusion with the encoded polypeptide. Such tags can be inserted anywhere within the polypeptide, including at either the carboxyl or amino terminus.

[0165] D. Regulatory Regions

[0166] The choice of regulatory regions to be included in a recombinant construct depends upon several factors, including, but not limited to, efficiency, selectability, inducibility, desired expression level, and cell- or tissue-preferential expression. It is a routine matter for one of skill in the art to modulate the expression of a coding sequence by appropriately selecting and positioning regulatory regions relative to the coding sequence. Transcription of a nucleic acid can be modulated in a similar manner.

[0167] Some suitable regulatory regions initiate transcription only, or predominantly, in certain cell types. Methods for identifying and characterizing regulatory regions in plant genomic DNA are known, including, for example, those described in the following references: Jordano et al., Plant Cell, 1:855-866 (1989); Bustos et al., Plant Cell, 1:839-854 (1989); Green et al., EMBO J., 7:4035-4044 (1988); Meier et al., Plant Cell, 3:309-316 (1991); and Zhang et al., Plant Physiology, 110:1069-1079 (1996).

[0168] Examples of various classes of regulatory regions are described below. Some of the regulatory regions indicated below as well as additional regulatory regions are described in more detail in U.S. Patent Application Ser. Nos. 60/505,689; 60/518,075; 60/544,771; 60/558,869; 60/583,691; 60/619,181; 60/637,140; 60/757,544; 60/776,307; 10/957,569; 11/058,689; 11/172,703; 11/208,308; 11/274,890; 60/583,609; 60/612,891; 11/097,589; 11/233,726; 11/408,791; 11/414,142; 10/950,321; 11/360,017; PCT/US05/011105; PCT/US05/23639; PCT/US05/034308; PCT/US05/034343; and PCT/US06/038236; PCT/US06/040572; and PCT/US07/62762.

[0169] For example, the sequences of regulatory regions p326, YP0144, YP0190, p13879, YP0050, p32449, 21876, YP0158, YP0214, YP0380, PT0848, PT0633, YP0128, YP0275, PT0660, PT0683, PT0758, PT0613, PT0672, PT0688, PT0837, YP0092, PT0676, PT0708, YP0396, YP0007, YP0111, YP0103, YP0028, YP0121, YP0008, YP0039, YP0115, YP0119, YP0120, YP0374, YP0101, YP0102, YP0110, YP0117, YP0137, YP0285, YP0212, YP0097, YP0107, YP0088, YP0143, YP0156, PT0650, PT0695, PT0723, PT0838, PT0879, PT0740, PT0535, PT0668, PT0886, PT0585, YP0381, YP0337, PT0710, YP0356, YP0385, YP0384, YP0286, YP0377, PD1367, PT0863, PT0829, PT0665, PT0678, YP0086, YP0188, YP0263, PT0743 and YP0096 are set forth in the sequence listing of PCT/US06/040572; the sequence of regulatory region PT0625 is set forth in the sequence listing of PCT/US05/034343; the sequences of regulatory regions PT0623, YP0388, YP0087, YP0093, YP0108, YP0022 and YP0080 are set forth in the sequence listing of U.S. patent application Ser. No. 11/172,703; the sequence of regulatory region PR0924 is set forth in the sequence listing of PCT/US07/62762; and the sequences of regulatory regions p530c10, pOsFIE2-2, pOsMEA, pOsYp102, and pOsYp285 are set forth in the sequence listing of PCT/US06/038236.

[0170] It will be appreciated that a regulatory region may meet criteria for one classification based on its activity in one plant species, and yet meet criteria for a different classification based on its activity in another plant species.

[0171] i. Broadly Expressing Promoters

[0172] A promoter can be said to be “broadly expressing” when it promotes transcription in many, but not necessarily all, plant tissues. For example, a broadly expressing promoter can promote transcription of an operably linked sequence in one or more of the shoot, shoot tip (apex), and leaves, but weakly or not at all in tissues such as roots or stems. As another example, a broadly expressing promoter can promote transcription of an operably linked sequence in one or more of the stem, shoot, shoot tip (apex), and leaves, but can promote transcription weakly or not at all in tissues such as reproductive tissues of flowers and developing seeds. Non-limiting examples of broadly expressing promoters that can be included in the nucleic acid constructs provided herein include the p326, YP0144, YP0190, p13879, YP0050, p32449, 21876, YP0158, YP0214, YP0380, PT0848, and PT0633 promoters. Additional examples include the cauliflower mosaic virus (CaMV) 35S promoter, the mannopine synthase (MAS) promoter, the 1′ or 2′ promoters derived from T-DNA of Agrobacterium tumefaciens, the figwort mosaic virus 34S promoter, actin promoters such as the rice actin promoter, and ubiquitin promoters such as the maize ubiquitin-1 promoter. In some cases, the CaMV 35S promoter is excluded from the category of broadly expressing promoters.

[0173] ii. Root Promoters

[0174] Root-active promoters confer transcription in root tissue, e.g., root endodermis, root epidermis, or root vascular tissues. In some embodiments, root-active promoters are root-preferential promoters, i.e., confer transcription only or predominantly in root tissue. Root-preferential promoters include the YP0128, YP0275, PT0625, PT0660, PT0683, and PT0758 promoters. Other root-preferential promoters include the PT0613, PT0672, PT0688, and PT0837 promoters, which drive transcription primarily in root tissue and to a lesser extent in ovules and/or seeds. Other examples of root-preferential promoters include the root-specific subdomains of the CaMV 35S promoter (Lam et al., Proc. Natl. Acad. Sci. USA, 86:7890-7894 (1989)), root cell specific promoters reported by Conkling et al., Plant Physiol., 93:1203-1211 (1990), and the tobacco RD2 promoter.

[0175] iii. Maturing Endosperm Promoters

[0176] In some embodiments, promoters that drive transcription in maturing endosperm can be useful. Transcription from a maturing endosperm promoter typically begins after fertilization and occurs primarily in endosperm tissue during seed development and is typically highest during the cellularization phase. Most suitable are promoters that are active predominantly in maturing endosperm, although promoters that are also active in other tissues can sometimes be used. Non-limiting examples of maturing endosperm promoters that can be included in the nucleic acid constructs provided herein include the napin promoter, the Arcelin-5 promoter, the phaseolin promoter (Bustos et al., Plant Cell, 1(9):839-853 (1989)), the soybean trypsin inhibitor promoter (Riggs et al., Plant Cell, 1(6):609-621 (1989)), the ACP promoter (Baerson et al., Plant Mol. Biol., 22(2):255-267 (1993)), the stearoyl-ACP desaturase promoter (Slocombe et al., Plant Physiol., 104(4):167-176 (1994)), the soybean α′ subunit of β-conglycinin promoter (Chen et al., Proc. Natl. Acad. Sci. USA, 83:8560-8564 (1986)), the oleosin promoter (Hong et al., Plant Mol. Biol., 34(3):549-555 (1997)), and zein promoters, such as the 15 kD zein promoter, the 16 kD zein promoter, 19 kD zein promoter, 22 kD zein promoter and 27 kD zein promoter. Also suitable are the Osgt-1 promoter from the rice glutelin-1 gene (Zheng et al., Mol. Cell Biol., 13:5829-5842 (1993)), the beta-amylase promoter, and the barley hordein promoter. Other maturing endosperm promoters include the YP0092, PT0676, and PT0708 promoters.

[0177] iv. Ovary Tissue Promoters

[0178] Promoters that are active in ovary tissues such as the ovule wall and mesocarp can also be useful, e.g., a polygalacturonidase promoter, the banana TRX promoter, the melon actin promoter, YP0396, and PT0623. Examples of promoters that are active primarily in ovules include YP0007, YP0111, YP0092, YP0103, YP0028, YP0121, YP0008, YP0039, YP0115, YP0119, YP0120, and YP0374.

[0179] v. Embryo Sac/Early Endosperm Promoters

[0180] To achieve expression in embryo sac/early endosperm, regulatory regions can be used that are active in polar nuclei and/or the central cell, or in precursors to polar nuclei, but not in egg cells or precursors to egg cells. Most suitable are promoters that drive expression only or predominantly in polar nuclei or precursors thereto and/or the central cell. A pattern of transcription that extends from polar nuclei into early endosperm development can also be found with embryo sac/early endosperm-preferential promoters, although transcription typically decreases significantly in later endosperm development during and after the cellularization phase. Expression in the zygote or developing embryo typically is not present with embryo sac/early endosperm promoters.

[0181] Promoters that may be suitable include those derived from the following genes: Arabidopsis viviparous-1 (see, GenBank No. U93215); Arabidopsis atmycl (see, Urao (1996) Plant Mol. Biol., 32:571-57; Conceicao (1994) Plant, 5:493-505); Arabidopsis FIE (GenBank No. AF129516); Arabidopsis MEA; Arabidopsis FIS2 (GenBank No. AF096096); and FIE 1.1 (U.S. Pat. No. 6,906,244). Other promoters that may be suitable include those derived from the following genes: maize MAC1 (see, Sheridan (1996) Genetics, 142:1009-1020); maize Cat3 (see, GenBank No. L05934; Abler (1993) Plant Mol. Biol., 22:10131-1038). Other promoters include the following Arabidopsis promoters: YP0039, YP0101, YP0102, YP0110, YP0117, YP0119, YP0137, DME, YP0285, and YP0212. Other promoters that may be useful include the following rice promoters: p530c10, pOsFIE2-2, pOsMEA, pOsYp102, and pOsYp285.

[0182] vi. Embryo Promoters

[0183] Regulatory regions that preferentially drive transcription in zygotic cells following fertilization can provide embryo-preferential expression. Most suitable are promoters that preferentially drive transcription in early stage embryos prior to the heart stage, but expression in late stage and maturing embryos is also suitable. Embryo-preferential promoters include the barley lipid transfer protein (Ltpl) promoter (Plant Cell Rep (2001) 20:647-654), YP0097, YP0107, YP0088, YP0143, YP0156, PT0650, PT0695, PT0723, PT0838, PT0879, and PT0740.

[0184] vii. Photosynthetic Tissue Promoters

[0185] Promoters active in photosynthetic tissue confer transcription in green tissues such as leaves and stems. Most suitable are promoters that drive expression only or predominantly in such tissues. Examples of such promoters include the ribulose-1,5-bisphosphate carboxylase (RbcS) promoters such as the RbcS promoter from eastern larch (Larix laricina), the pine cab6 promoter (Yamamoto et al., Plant Cell Physiol., 35:773-778 (1994)), the Cab-1 promoter from wheat (Fejes et al., Plant Mol. Biol., 15:921-932 (1990)), the CAB-1 promoter from spinach (Lubberstedt et al., Plant Physiol., 104:997-1006 (1994)), the cablR promoter from rice (Luan et al., Plant Cell, 4:971-981 (1992)), the pyruvate orthophosphate dikinase (PPDK) promoter from corn (Matsuoka et al., Proc. Natl. Acad. Sci. USA, 90:9586-9590 (1993)), the tobacco Lhcb1*2 promoter (Cerdan et al., Plant Mol. Biol., 33:245-255 (1997)), the Arabidopsis thaliana SUC2 sucrose-H+ symporter promoter (Truernit et al., Planta, 196:564-570 (1995)), and thylakoid membrane protein promoters from spinach (psaD, psaF, psaE, PC, FNR, atpC, atpD, cab, rbcS). Other photosynthetic tissue promoters include PT0535, PT0668, PT0886, YP0144, YP0380 and PT0585.

[0186] viii. Vascular Tissue Promoters

[0187] Examples of promoters that have high or preferential activity in vascular bundles include YP0087, YP0093, YP0108, YP0022, and YP0080. Other vascular tissue-preferential promoters include the glycine-rich cell wall protein GRP 1.8 promoter (Keller and Baumgartner, Plant Cell, 3(10):1051-1061 (1991)), the Commelina yellow mottle virus (CoYMV) promoter (Medberry et al., Plant Cell, 4(2):185-192 (1992)), and the rice tungro bacilliform virus (RTBV) promoter (Dai et al., Proc. Natl. Acad. Sci. USA, 101(2):687-692 (2004)).

[0188] ix. Inducible Promoters

[0189] Inducible promoters confer transcription in response to external stimuli such as chemical agents or environmental stimuli. For example, inducible promoters can confer transcription in response to hormones such as giberellic acid or ethylene, or in response to light or drought. Examples of drought-inducible promoters include YP0380, PT0848, YP0381, YP0337, PT0633, YP0374, PT0710, YP0356, YP0385, YP0396, YP0388, YP0384, PT0688, YP0286, YP0377, PD1367, and PD0901. Examples of nitrogen-inducible promoters include PT0863, PT0829, PT0665, and PT0886. Examples of shade-inducible promoters include PR0924 and PT0678. An example of a promoter induced by salt is rd29A (Kasuga et al., Nature Biotech 17: 287-291 (1999)).

[0190] x. Basal Promoters

[0191] A basal promoter is the minimal sequence necessary for assembly of a transcription complex required for transcription initiation. Basal promoters frequently include a “TATA box” element that may be located between about 15 and about 35 nucleotides upstream from the site of transcription initiation. Basal promoters also may include a “CCAAT box” element (typically the sequence CCAAT) and/or a GGGCG sequence, which can be located between about 40 and about 200 nucleotides, typically about 60 to about 120 nucleotides, upstream from the transcription start site.

[0192] xi. Stem Promoters

[0193] A stem promoter may be specific to one or more stem tissues or specific to stem and other plant parts. Stem promoters may have high or preferential activity in, for example, epidermis and cortex, vascular cambium, procambium, or xylem. Examples of stem promoters include YP0018 which is disclosed in US20060015970 and CryIA(b) and CryIA(c) (Braga et al., Journal of New Seeds 5:209-221 (2003)).

[0194] xii. Other Promoters

[0195] Other classes of promoters include, but are not limited to, shoot-preferential, callus-preferential, trichome cell-preferential, guard cell-preferential such as PT0678, tuber-preferential, parenchyma cell-preferential, and senescence-preferential promoters. Promoters designated YP0086, YP0188, YP0263, PT0758, PT0743, PT0829, YP0119, and YP0096, as described in the above-referenced patent applications, may also be useful.

[0196] xiii. Other Regulatory Regions

[0197] A 5′ untranslated region (UTR) can be included in nucleic acid constructs described herein. A 5′ UTR is transcribed, but is not translated, and lies between the start site of the transcript and the translation initiation codon and may include the +1 nucleotide. A 3′ UTR can be positioned between the translation termination codon and the end of the transcript. UTRs can have particular functions such as increasing mRNA stability or attenuating translation. Examples of 3′ UTRs include, but are not limited to, polyadenylation signals and transcription termination sequences, e.g., a nopaline synthase termination sequence.

[0198] It will be understood that more than one regulatory region may be present in a recombinant polynucleotide, e.g., introns, enhancers, upstream activation regions, transcription terminators, and inducible elements. Thus, for example, more than one regulatory region can be operably linked to the sequence of a polynucleotide encoding a heat and/or drought-tolerance polypeptide.

[0199] Regulatory regions, such as promoters for endogenous genes, can be obtained by chemical synthesis or by subcloning from a genomic DNA that includes such a regulatory region. A nucleic acid comprising such a regulatory region can also include flanking sequences that contain restriction enzyme sites that facilitate subsequent manipulation.

### IV. TRANSGENIC PLANTS AND PLANT CELLS

### A. Transformation

[0200] The invention also features transgenic plant cells and plants comprising at least one recombinant nucleic acid construct described herein. A plant or plant cell can be transformed by having a construct integrated into its genome, i.e., can be stably transformed. Stably transformed cells typically retain the introduced nucleic acid with each cell division. A plant or plant cell can also be transiently transformed such that the construct is not integrated into its genome. Transiently transformed cells typically lose all or some portion of the introduced nucleic acid construct with each cell division such that the introduced nucleic acid cannot be detected in daughter cells after a sufficient number of cell divisions. Both transiently transformed and stably transformed transgenic plants and plant cells can be useful in the methods described herein.

[0201] Transgenic plant cells used in methods described herein can constitute part or all of a whole plant. Such plants can be grown in a manner suitable for the species under consideration, either in a growth chamber, a greenhouse, or in a field. Transgenic plants can be bred as desired for a particular purpose, e.g., to introduce a recombinant nucleic acid into other lines, to transfer a recombinant nucleic acid to other species, or for further selection of other desirable traits. Alternatively, transgenic plants can be propagated vegetatively for those species amenable to such techniques. As used herein, a transgenic plant also refers to progeny of an initial transgenic plant provided the progeny inherits the transgene. Seeds produced by a transgenic plant can be grown and then selfed (or outcrossed and selfed) to obtain seeds homozygous for the nucleic acid construct.

[0202] Transgenic plants can be grown in suspension culture, or tissue or organ culture. For the purposes of this invention, solid and/or liquid tissue culture techniques can be used. When using solid medium, transgenic plant cells can be placed directly onto the medium or can be placed onto a filter that is then placed in contact with the medium. When using liquid medium, transgenic plant cells can be placed onto a flotation device, e.g., a porous membrane that contacts the liquid medium. A solid medium can be, for example, Murashige and Skoog (MS) medium containing agar and a suitable concentration of an auxin, e.g., 2,4-dichlorophenoxyacetic acid (2,4-D), and a suitable concentration of a cytokinin, e.g., kinetin.

[0203] When transiently transformed plant cells are used, a reporter sequence encoding a reporter polypeptide having a reporter activity can be included in the transformation procedure and an assay for reporter activity or expression can be performed at a suitable time after transformation. A suitable time for conducting the assay typically is about 1-21 days after transformation, e.g., about 1-14 days, about 1-7 days, or about 1-3 days. The use of transient assays is particularly convenient for rapid analysis in different species, or to confirm expression of a heterologous heat and/or drought-tolerance polypeptide whose expression has not previously been confirmed in particular recipient cells.

[0204] Techniques for introducing nucleic acids into monocotyledonous and dicotyledonous plants are known in the art, and include, without limitation, Agrobacterium-mediated transformation, viral vector-mediated transformation, electroporation and particle gun transformation, e.g., U.S. Pat. Nos. 5,538,880; 5,204,253; 6,329,571 and 6,013,863. If a cell or cultured tissue is used as the recipient tissue for transformation, plants can be regenerated from transformed cultures if desired, by techniques known to those skilled in the art.

### B. Screening/Selection

[0205] A population of transgenic plants can be screened and/or selected for those members of the population that have a trait or phenotype conferred by expression of the transgene. For example, a population of progeny of a single transformation event can be screened for those plants having a desired level of expression of a heat and/or drought-tolerance polypeptide or nucleic acid. Physical and biochemical methods can be used to identify expression levels. These include Southern analysis or PCR amplification for detection of a polynucleotide; Northern blots, S1 RNase protection, primer-extension, or RT-PCR amplification for detecting RNA transcripts; enzymatic assays for detecting enzyme or ribozyme activity of polypeptides and polynucleotides; and protein gel electrophoresis, Western blots, immunoprecipitation, and enzyme-linked immunoassays to detect polypeptides. Other techniques such as in situ hybridization, enzyme staining, and immunostaining also can be used to detect the presence or expression of polypeptides and/or polynucleotides. Methods for performing all of the referenced techniques are known. As an alternative, a population of plants comprising independent transformation events can be screened for those plants having a desired trait, such as increased drought tolerance or increased heat tolerance. Selection and/or screening can be carried out over one or more generations, and/or in more than one geographic location. In some cases, transgenic plants can be grown and selected under conditions which induce a desired phenotype or are otherwise necessary to produce a desired phenotype in a transgenic plant. In addition, selection and/or screening can be applied during a particular developmental stage in which the phenotype is expected to be exhibited by the plant. Selection and/or screening can be carried out to choose those transgenic plants having a statistically significant difference in heat and/or drought tolerance relative to a control plant that lacks the transgene. Selected or screened transgenic plants have an altered phenotype as compared to a corresponding control plant, as described in the “Transgenic Plant Phenotypes” section herein.

### C. Plant Species

[0206] The polynucleotides and vectors described herein can be used to transform a number of monocotyledonous and dicotyledonous plants and plant cell systems, including species from one of the following families: Acanthaceae, Alliaceae, Alstroemeriaceae, Amaryllidaceae, Apocynaceae, Arecaceae, Asteraceae, Berberidaceae, Bixaceae, Brassicaceae, Bromeliaceae, Cannabaceae, Caryophyllaceae, Cephalotaxaceae, Chenopodiaceae, Colchicaceae, Cucurbitaceae, Dioscoreaceae, Ephedraceae, Erythroxylaceae, Euphorbiaceae, Fabaceae, Lamiaceae, Linaceae, Lycopodiaceae, Malvaceae, Melanthiaceae, Musaceae, Myrtaceae, Nyssaceae, Papaveraceae, Pinaceae, Plantaginaceae, Poaceae, Rosaceae, Rubiaceae, Salicaceae, Sapindaceae, Solanaceae, Taxaceae, Theaceae, or Vitaceae.

[0207] Suitable species may include members of the genus Abelmoschus, Abies, Acer, Agrostis, Allium, Alstroemeria, Ananas, Andrographis, Andropogon, Artemisia, Arundo, Atropa, Berberis, Beta, Bixa, Brassica, Calendula, Camellia, Camptotheca, Cannabis, Capsicum, Carthamus, Catharanthus, Cephalotaxus, Chrysanthemum, Cinchona, Citrullus, Coffea, Colchicum, Coleus, Cucumis, Cucurbita, Cynodon, Datura, Dianthus, Digitalis, Dioscorea, Elaeis, Ephedra, Erianthus, Erythroxylum, Eucalyptus, Festuca, Fragaria, Galanthus, Glycine, Gossypium, Helianthus, Hevea, Hordeum, Hyoscyamus, Jatropha, Lactuca, Linum, Lolium, Lupinus, Lycopersicon, Lycopodium, Manihot, Medicago, Mentha, Miscanthus, Musa, Nicotiana, Oryza, Panicum, Papaver, Parthenium, Pennisetum, Petunia, Phalaris, Phleum, Pinus, Poa, Poinsettia, Populus, Rauwolfia, Ricinus, Rosa, Saccharum, Salix, Sanguinaria, Scopolia, Secale, Solanum, Sorghum, Spartina, Spinacea, Tanacetum, Taxus, Theobroma, Triticosecale, Triticum, Uniola, Veratrum, Vinca, Vitis, and Zea.

[0208] Suitable species include Panicum spp. or hybrids thereof, Sorghum spp. or hybrids thereof, sudangrass, Miscanthus spp. or hybrids thereof, Saccharum spp. or hybrids thereof, Erianthus spp., Populus spp., Andropogon gerardii (big bluestem), Pennisetum purpureum (elephant grass) or hybrids thereof (e.g., Pennisetum purpureum×Pennisetum typhoidum), Phalaris arundinacea (reed canarygrass), Cynodon dactylon (bermudagrass), Festuca arundinacea (tall fescue), Spartina pectinata (prairie cord-grass), Medicago sativa (alfalfa), Arundo donax (giant reed) or hybrids thereof, Secale cereale (rye), Salix spp. (willow), Eucalyptus spp. (eucalyptus), Triticosecale (Triticum—wheat X rye), Tripsicum dactyloides (Eastern gammagrass), Leymus cinereus (basin wildrye), Leymus condensatus (giant wildrye), and bamboo.

[0209] In some embodiments, a suitable species can be a wild, weedy, or cultivated sorghum species such as, but not limited to, Sorghum almum, Sorghum amplum, Sorghum angustum, Sorghum arundinaceum, Sorghum bicolor (such as bicolor, guinea, caudatum, kafir, and durra), Sorghum brachypodum, Sorghum bulbosum, Sorghum burmahicum, Sorghum controversum, Sorghum drummondii, Sorghum ecarinatum, Sorghum exstans, Sorghum grande, Sorghum halepense, Sorghum interjectum, Sorghum intrans, Sorghum laxiflorum, Sorghum leiocladum, Sorghum macrospermum, Sorghum matarankense, Sorghum miliaceum, Sorghum nigrum, Sorghum nitidum, Sorghum plumosum, Sorghum propinquum, Sorghum purpureosericeum, Sorghum stipoideum, Sorghum sudanensese, Sorghum timorense, Sorghum trichocladum, Sorghum versicolor, Sorghum virgatum, Sorghum vulgare, or hybrids such as Sorghum×almum, Sorghum×sudangrass or Sorghum×drummondii.

[0210] Suitable species also include Helianthus annuus (sunflower), Carthamus tinctorius (safflower), Jatropha curcas (jatropha), Ricinus communis (castor), Elaeis guineensis (palm), Linum usitatissimum (flax), and Brassica juncea.

[0211] Suitable species also include Beta vulgaris (sugarbeet), and Manihot esculenta (cassava).

[0212] Suitable species also include Lycopersicon esculentum (tomato), Lactuca sativa (lettuce), Musa paradisiaca (banana), Solanum tuberosum (potato), Brassica oleracea (broccoli, cauliflower, brusselsprouts), Camellia sinensis (tea), Fragaria ananassa (strawberry), Theobroma cacao (cocoa), Coffea arabica (coffee), Vitis vinifera (grape), Ananas comosus (pineapple), Capsicum annum (hot & sweet pepper), Allium cepa (onion), Cucumis melo (melon), Cucumis sativus (cucumber), Cucurbita maxima (squash), Cucurbita moschata (squash), Spinacea oleracea (spinach), Citrullus lanatus (watermelon), Abelmoschus esculentus (okra), and Solanum melongena (eggplant).

[0213] Suitable species also include Papaver somniferum (opium poppy), Papaver orientale, Taxus baccata, Taxus brevifolia, Artemisia annua, Cannabis sativa, Camptotheca acuminate, Catharanthus roseus, Vinca rosea, Cinchona officinalis, Colchicum autumnale, Veratrum californica, Digitalis lanata, Digitalis purpurea, Dioscorea spp., Andrographis paniculata, Atropa belladonna, Datura stomonium, Berberis spp., Cephalotaxus spp., Ephedra sinica, Ephedra spp., Erythroxylum coca, Galanthus wornorii, Scopolia spp., Lycopodium serratum (=Huperzia serrata), Lycopodium spp., Rauwolfia serpentina, Rauwolfia spp., Sanguinaria canadensis, Hyoscyamus spp., Calendula officinalis, Chrysanthemum parthenium, Coleus forskohlii, and Tanacetum parthenium.

[0214] Suitable species also include Parthenium argentatum (guayule), Hevea spp. (rubber), Mentha spicata (mint), Mentha piperita (mint), Bixa orellana, and Alstroemeria spp.

[0215] Suitable species also include Rosa spp. (rose), Dianthus caryophyllus (carnation), Petunia spp. (petunia) and Poinsettia pulcherrima (poinsettia).

[0216] Suitable species also include Nicotiana tabacum (tobacco), Lupinus albus (lupin), Uniola paniculata (oats), bentgrass (Agrostis spp.), Populus tremuloides (aspen), Pinus spp. (pine), Abies spp. (fir), Acer spp. (maple, Hordeum vulgare (barley), Poa pratensis (bluegrass), Lolium spp. (ryegrass) and Phleum pratense (timothy).

[0217] Thus, the methods and compositions can be used over a broad range of plant species, including species from the dicot genera Brassica, Carthamus, Glycine, Gossypium, Helianthus, Jatropha, Parthenium, Populus, and Ricinus; and the monocot genera Elaeis, Festuca, Hordeum, Lolium, Oryza, Panicum, Pennisetum, Phleum, Poa, Saccharum, Secale, Sorghum, Triticosecale, Triticum, and Zea. In some embodiments, a plant is a member of the species Panicum virgatum (switchgrass), Sorghum bicolor (sorghum, sudangrass), Miscanthus giganteus (miscanthus), Saccharum sp. (energycane), Populus balsamifera (poplar), Zea mays (corn), Glycine max (soybean), Brassica napus (canola), Triticum aestivum (wheat), Gossypium hirsutum (cotton), Oryza sativa (rice), Helianthus annuus (sunflower), Medicago sativa (alfalfa), Beta vulgaris (sugarbeet), or Pennisetum glaucum (pearl millet).

[0218] In certain embodiments, the polynucleotides and vectors described herein can be used to transform a number of monocotyledonous and dicotyledonous plants and plant cell systems, wherein such plants are hybrids of different species or varieties of a specific species (e.g., Saccharum sp. X Miscanthus sp., Saccharum sp. X Sorghum sp., Panicum virgatum×Panicum amarum, Panicum virgatum×Panicum amarulum, and Pennisetum purpureum×Pennisetum typhoidum).

### D. Transgenic Plant Phenotypes

[0219] In some embodiments, a plant in which expression of a heat and/or drought-tolerance polypeptide is modulated can have increased heat tolerance or drought tolerance. In some cases, a plant in which expression of a heat and/or drought-tolerance polypeptide is modulated can exhibit both heat tolerance and drought tolerance. The phenotype of a transgenic plant in which expression of a heat and/or drought-tolerance polypeptide is modulated and a corresponding control plant that either lacks the transgene or does not express the transgene can be evaluated under particular environmental conditions that are useful for simulating drought conditions. The phenotype of a transgenic plant in which expression of a heat and/or drought-tolerance polypeptide is modulated and a corresponding control plant can also be evaluated under heat shock conditions.

[0220] For example, a heat and/or drought-tolerance polypeptide described herein can be expressed in a transgenic plant, resulting in increased growth as compared to a plant that does not express the polypeptide when grown under drought conditions or heat shock conditions, or following such conditions. Growth can be assessed with physiological parameters such as, for example, plant height, number of new shoots, number of new leaves, leaf length, seedling area, or seed number.

[0221] In some cases, a transgenic plant expressing a heat and/or drought tolerance polypeptide described herein can exhibit a height that is from about 5% to about 100% greater (e.g., about 5% to about 12%; about 5% to about 40%; about 5% to about 80%; about 7% to about 20%; about 10% to about 15%; about 10% to about 50%; about 10% to about 90%; about 20% to about 25%; about 20% to about 45%; about 20% to about 75%; about 25% to about 60%; about 25% to about 100%; about 30% to about 50%; about 30% to about 70%; about 40% to about 50%; about 45% to about 60%; about 50% to about 80%; about 55% to about 75%; about 60% to about 80%; about 60% to about 95%; about 75% to about 100%; about 80% to about 100%; about 90% to about 95%; or about 95% to about 100% greater) than a plant not expressing the polypeptide when grown under drought conditions or heat shock conditions, or following such conditions.

[0222] In some instances, a transgenic plant expressing a heat and/or drought-tolerance polypeptide can exhibit greater leaf area or greater leaf length than a corresponding control plant that does not express the polypeptide when grown under heat shock conditions or drought conditions, or following such conditions. For example, a transgenic plant expressing a heat and/or drought-tolerance polypeptide can have a leaf area that is 5% to about 100% greater (e.g., about 5% to about 7%; about 5% to about 20%; about 8% to about 80%; about 10% to about 20%; about 10% to about 25%; about 10% to about 50%; about 10% to about 90%; about 15% to about 25%; about 20% to about 45%; about 20% to about 70%; about 25% to about 40%; about 25% to about 100%; about 30% to about 50%; about 30% to about 70%; about 40% to about 50%; about 45% to about 60%; about 50% to about 80%; about 55% to about 75%; about 60% to about 80%; about 60% to about 95%; about 75% to about 100%; about 80% to about 100%; about 90% to about 95%; or about 95% to about 100% greater) than a corresponding control plant that does not express the polypeptide when grown under heat shock conditions or drought conditions, or following such conditions. In another example, a transgenic plant expressing a heat and/or drought-tolerance polypeptide can have a leaf length that is from about 5% to about 100% greater (e.g., about 5% to about 12%; about 5% to about 40%; about 5% to about 80%; about 7% to about 20%; about 10% to about 15%; about 10% to about 50%; about 10% to about 90%; about 20% to about 25%; about 20% to about 45%; about 20% to about 75%; about 25% to about 60%; about 25% to about 100%; about 30% to about 50%; about 30% to about 70%; about 40% to about 50%; about 45% to about 60%; about 50% to about 80%; about 55% to about 75%; about 60% to about 80%; about 60% to about 95%; about 75% to about 100%; about 80% to about 100%; about 90% to about 95%; or about 95% to about 100% greater) than a corresponding control plant that does not express the polypeptide when grown under heat shock conditions or drought conditions, or following such conditions.

[0223] In other cases, when a polypeptide described herein is expressed in a transgenic plant, the transgenic plant can exhibit a seed number (number of seeds per plant) from about 10% to about 95% greater (e.g., from about 10% to about 20%; from about 10% to about 50%; from about 10% to about 70%; from about 20% to about 60%; from about 20% to about 75%; from about 25% to about 85%; from about 30% to about 70%; from about 35% to about 90%; from about 40% to about 60%; from about 40% to about 85%; from about 50% to about 80%; from about 50% to about 90%; or from about 70% to about 90% greater) than a control plant not expressing the polypeptide when grown under heat shock conditions or drought conditions. In certain cases, when a polypeptide described herein is expressed in a transgenic plant, the transgenic plant can exhibit an increase in seed weight per plant from about 5% to about 100% greater (e.g., about 5% to about 12%; about 5% to about 40%; about 5% to about 80%; about 7% to about 20%; about 10% to about 15%; about 10% to about 50%; about 10% to about 90%; about 20% to about 25%; about 20% to about 45%; about 20% to about 75%; about 25% to about 60%; about 25% to about 100%; about 30% to about 50%; about 30% to about 70%; about 40% to about 50%; about 45% to about 60%; about 50% to about 80%; about 55% to about 75%; about 60% to about 80%; about 60% to about 95%; about 75% to about 100%; about 80% to about 100%; about 90% to about 95%; or about 95% to about 100% greater) than the seed weight in a plant not expressing the polypeptide when grown under heat shock conditions or drought conditions.

[0224] Transgenic plants expressing a heat and/or drought-tolerance polypeptide also can exhibit a lower transpiration rate compared to control plants of the same genetic background. Transpiration rate is another physiological parameter that is indicative of how well a plant can tolerate drought conditions. For example, plants with a low transpiration rate are expected to lose water more slowly than plants with higher transpiration rates and therefore would be expected to better withstand drought conditions (i.e., have better drought tolerance). When a polypeptide described herein is expressed in a transgenic plant, the transgenic plant can exhibit a transpiration rate that is reduced by about 0.25% to 100% (e.g., 0.27%, 0.3%, 0.43%, 0.55%, 0.7%, 0.99%, 1%, 2%, 4%, 6%, 8%, 10%, 12%, 15%, 18%, 22%, 28%, 35%, 37%, 42%, 45%, 47%, 50%, 55%, 64%, 68%, 71%, 75%, 77%, 80%, 83%, 86%, 89%, 90%, 92%, 95%, 98%, or 99%) as compared to the transpiration rate in a corresponding control plant when grown under drought conditions.

[0225] In some cases, a transgenic plant expressing a heat and/or drought-tolerance polypeptide described herein can exhibit a decreased change in photosynthetic activity (ΔFv/Fm) after exposure to heat shock conditions as compared to a corresponding control plant that does not express the polypeptide when grown under the same conditions. In some cases, a transgenic plant expressing a heat and/or drought-tolerance polypeptide described herein can exhibit an increased change in photosynthetic activity (ΔFv/Fm-D₂) two days post heat-shock treatment as compared to a corresponding control plant that does not express the polypeptide when grown under the same conditions. For example, a transgenic plant expressing a heat and/or drought-tolerance polypeptide can exhibit a ΔFv/Fm of from about 0.1 to about 0.8 (e.g., about 0.2 to about 0.28; about 0.2 to about 0.32; about 0.22 to about 0.35; about 0.29 to about 0.4; about 0.3 to about 0.45; about 0.33 to about 0.41; about 0.35 to about 0.5; about 0.4 to about 0.8; about 0.46 to about 0.52; about 0.5 to about 0.65; about 0.5 to about 0.8; about 0.6 to about 0.7; about 0.6 to about 0.9; about 0.65 to about 0.75; about 0.7 to about 0.9; or about 0.75 to about 0.8) or a ΔFv/Fm-D₂ range of from about 0.03 to about 0.8 (e.g., about 0.03 to about 0.08; about 0.03 to about 0.032; about 0.04 to about 0.05; about 0.09 to about 0.4; about 0.05 to about 0.5; about 0.075 to about 0.1; about 0.08 to about 0.2; about 0.3 to about 0.45; about 0.33 to about 0.41; about 0.35 to about 0.5; about 0.4 to about 0.8; about 0.46 to about 0.52; about 0.5 to about 0.65; about 0.5 to about 0.8; about 0.6 to about 0.7; about 0.6 to about 0.9; about 0.65 to about 0.75; about 0.7 to about 0.9; about 0.75 to about 0.85; or about 0.8 to about 0.9). In some embodiments, photosynthetic activity can be reduced by about 0.25% to about 100% (e.g., about 0.25% to about 0.4%, about 0.25% to about 1%, about 0.25% to about 5%, about 0.5% to about 10%, about 1% to about 5%, about 1% to about 10%, about 2% to about 8%, about 3% to about 20%, about 5% to about 7%; about 5% to about 20%; about 5% to about 45%, about 8% to about 80%; about 10% to about 20%; about 10% to about 25%; about 10% to about 50%; about 10% to about 90%; about 15% to about 25%; about 20% to about 45%; about 20% to about 70%; about 25% to about 40%; about 25% to about 99%; about 30% to about 50%; about 30% to about 70%; about 40% to about 50%; about 45% to about 60%; about 50% to about 80%; about 55% to about 75%; about 60% to about 80%; about 60% to about 95%; about 75% to about 99%; about 80% to about 99%; about 90% to about 95%; or about 95% to about 100%) as compared to the photosynthetic activity in a corresponding control plant following heat shock conditions.

[0226] Typically, a difference in the heat and/or drought tolerance in a transgenic plant relative to a control plant is considered statistically significant at p≦0.05 with an appropriate parametric or non-parametric statistic, e.g., Chi-square test, Student's t-test, Mann-Whitney test, or F-test. In some embodiments, a difference in the heat and/or drought tolerance is statistically significant at p<0.1, p<0.05, or p<0.01.

[0227] The phenotype of a transgenic plant is evaluated relative to a control plant. A plant is said “not to express” a polypeptide when the plant exhibits less than 10%, e.g., less than 9%, 8%, 7%, 6%, 5%, 4%, 3%, 2%, 1%, 0.5%, 0.1%, 0.1%, or 0.01%, of the amount of polypeptide or mRNA encoding the polypeptide exhibited by the plant of interest. Expression can be evaluated using methods including, for example, RT-PCR, Northern blots, S1 RNase protection, primer extensions, Western blots, protein gel electrophoresis, immunoprecipitation, enzyme-linked immunoassays, chip assays, and mass spectrometry. It should be noted that if a polypeptide is expressed under the control of a tissue-preferential or broadly expressing promoter, expression can be evaluated in the entire plant or in a selected tissue. Similarly, if a polypeptide is expressed at a particular time, e.g., at a particular time in development or upon induction, expression can be evaluated selectively at a desired time period.

### V. PLANT BREEDING

[0228] Genetic polymorphisms are discrete allelic sequence differences in a population. Typically, an allele that is present at 1% or greater is considered to be a genetic polymorphism. The discovery that polypeptides disclosed herein can increase heat and/or drought tolerance is useful in plant breeding, because genetic polymorphisms exhibiting a degree of linkage with loci for such polypeptides are more likely to be correlated with variation in heat and/or drought tolerance. For example, genetic polymorphisms linked to the loci for such polypeptides are more likely to be useful in marker-assisted breeding programs to create lines having increased heat and/or drought tolerance.

[0229] Thus, one aspect of the invention includes methods of identifying whether one or more genetic polymorphisms are associated with heat and/or drought tolerance. Such methods involve determining whether genetic polymorphisms in a given population exhibit linkage with the locus for one of the polypeptides depicted in FIGS. 1-16 and/or a functional homolog thereof. The correlation is measured between variation in heat and/or drought tolerance in plants of the population and the presence of the genetic polymorphism(s) in plants of the population, thereby identifying whether or not the genetic polymorphism(s) are associated with variation for the trait. If the presence of a particular allele is statistically significantly correlated with a modulation in heat and/or drought tolerance, the allele is associated with variation for the trait and is useful as a marker for the trait. If, on the other hand, the presence of a particular allele is not significantly correlated with the desired modulation, the allele is not associated with variation for the trait and is not useful as a marker.

[0230] Such methods are applicable to populations containing the naturally occurring endogenous polypeptide rather than an exogenous nucleic acid encoding the polypeptide, i.e., populations that are not transgenic for the exogenous nucleic acid. It will be appreciated, however, that populations suitable for use in the methods may contain a transgene for another, different trait, e.g., herbicide resistance.

[0231] Genetic polymorphisms that are useful in such methods include simple sequence repeats (SSRs, or microsatellites), rapid amplification of polymorphic DNA (RAPDs), single nucleotide polymorphisms (SNPs), amplified fragment length polymorphisms (AFLPs) and restriction fragment length polymorphisms (RFLPs). SSR polymorphisms can be identified, for example, by making sequence specific probes and amplifying template DNA from individuals in the population of interest by PCR. For example, PCR techniques can be used to enzymatically amplify a genetic marker associated with a nucleotide sequence conferring a specific trait (e.g., nucleotide sequences described herein). PCR can be used to amplify specific sequences from DNA as well as RNA, including sequences from total genomic DNA or total cellular RNA. When using RNA as a source of template, reverse transcriptase can be used to synthesize complementary DNA (cDNA) strands. Various PCR methods are described, for example, in PCR Primer: A Laboratory Manual, Dieffenbach and Dveksler, eds., Cold Spring Harbor Laboratory Press, 1995.

[0232] Generally, sequence information from polynucleotides flanking the region of interest or beyond is employed to design oligonucleotide primers that are identical or similar in sequence to opposite strands of the template to be amplified. Primers are typically 14 to 40 nucleotides in length, but can range from 10 nucleotides to hundreds of nucleotides in length. Template and amplified DNA is repeatedly denatured at a high temperature to separate the double strand, then cooled to allow annealing of primers and the extension of nucleotide sequences through the microsatellite, resulting in sufficient DNA for detection of PCR products. If the probes flank an SSR in the population, PCR products of different sizes will be produced. See, e.g., U.S. Pat. No. 5,766,847.

[0233] PCR products can be qualitative or quantitatively analyzed using several techniques. For example, PCR products can be stained with a fluorescent molecule (e.g., PicoGreen® or OliGreen®) and detected in solution using spectrophotometry or capillary electrophoresis. In some cases, PCR products can be separated in a gel matrix (e.g., agarose or polyacrylamide) by electrophoresis, and size-fractionated bands comprising PCR products can be visualized using nucleic acid stains. Suitable stains can fluoresce under UV light (e.g., Ethidium bromide, GR Safe, SYBR® Green, or SYBR® Gold). The results can be visualized via transillumination or epi-illumination, and an image of the fluorescent pattern can be acquired using a camera or scanner, for example. The image can be processed and analyzed using specialized software (e.g., ImageJ) to measure and compare the intensity of a band of interest against a standard loaded on the same gel.

[0234] Alternatively, SSR polymorphisms can be identified by using PCR product(s) as a probe against Southern blots from different individuals in the population. See, U. H. Refseth et al., (1997) Electrophoresis 18: 1519. Briefly, PCR products are separated by length through gel electrophoresis and transferred to a membrane. SSR-specific DNA probes, such as oligonucleotides labeled with radioactive, fluorescent, or chromogenic molecules, are applied to the membrane and hybridize to bound PCR products with a complementary nucleotide sequence. The pattern of hybridization can be visualized by autoradiography or by development of color on the membrane, for example.

[0235] In some cases, PCR products can be quantified using a real-time thermocycler detection system. For example, Quantitative real-time PCR can use a fluorescent dye that forms a DNA-dye-complex (e.g., SYBR® Green), or a fluorophore-containing DNA probe, such as single-stranded oligonucleotides covalently bound to a fluorescent reporter or fluorophore (e.g. 6-carboxyfluorescein or tetrachlorofluorescin) and quencher (e.g., tetramethylrhodamine or dihydrocyclopyrroloindole tripeptide minor groove binder). The fluorescent signal allows detection of the amplified product in real time, thereby indicating the presence of a sequence of interest, and allowing quantification of the copy number of a sequence of interest in cellular DNA or expression level of a sequence of interest from cellular mRNA.

[0236] The identification of RFLPs is discussed, for example, in Alonso-Blanco et al. (Methods in Molecular Biology, vol. 82, “Arabidopsis Protocols”, pp. 137-146, J. M. Martinez-Zapater and J. Salinas, eds., c. 1998 by Humana Press, Totowa, N.J.); Burr (“Mapping Genes with Recombinant Inbreds”, pp. 249-254, in Freeling, M. and V. Walbot (Ed.), The Maize Handbook, c. 1994 by Springer-Verlag New York, Inc.: New York, N.Y., USA; Berlin Germany; Burr et al. Genetics (1998) 118: 519; and Gardiner, J. et al., (1993) Genetics 134: 917). For example, to produce a RFLP library enriched with single- or low-copy expressed sequences, total DNA can be digested with a methylation-sensitive enzyme (e.g., PstI). The digested DNA can be separated by size on a preparative gel. Polynucleotide fragments (500 to 2000 bp) can be excised, eluted and cloned into a plasmid vector (e.g., pUC18). Southern blots of plasmid digests can be probed with total sheared DNA to select clones that hybridize to single- and low-copy sequences. Additional restriction endonucleases can be tested to increase the number of polymorphisms detected.

[0237] The identification of AFLPs is discussed, for example, in EP 0 534 858 and U.S. Pat. No. 5,878,215. In general, total cellular DNA is digested with one or more restriction enzymes. Restriction halfsite-specific adapters are ligated to all restriction fragments and the fragments are selectively amplified with two PCR primers that have corresponding adaptor and restriction site specific sequences. The PCR products can be visualized after size-fractionation, as described above.

[0238] In some embodiments, the methods are directed to breeding a plant line. Such methods use genetic polymorphisms identified as described above in a marker assisted breeding program to facilitate the development of lines that have increased heat and/or drought tolerance. Once a suitable genetic polymorphism is identified as being associated with variation for the trait, one or more individual plants are identified that possess the polymorphic allele correlated with the desired variation. Those plants are then used in a breeding program to combine the polymorphic allele with a plurality of other alleles at other loci that are correlated with the desired variation. Techniques suitable for use in a plant breeding program are known in the art and include, without limitation, backcrossing, mass selection, pedigree breeding, bulk selection, crossing to another population and recurrent selection. These techniques can be used alone or in combination with one or more other techniques in a breeding program. Thus, each identified plants is selfed or crossed a different plant to produce seed which is then germinated to form progeny plants. At least one such progeny plant is then selfed or crossed with a different plant to form a subsequent progeny generation. The breeding program can repeat the steps of selfing or outcrossing for an additional 0 to 5 generations as appropriate in order to achieve the desired uniformity and stability in the resulting plant line, which retains the polymorphic allele. In most breeding programs, analysis for the particular polymorphic allele will be carried out in each generation, although analysis can be carried out in alternate generations if desired.

[0239] In some cases, selection for other useful traits is also carried out, e.g., selection for fungal resistance or bacterial resistance. Selection for such other traits can be carried out before, during or after identification of individual plants that possess the desired polymorphic allele.

### VI. ARTICLES OF MANUFACTURE

[0240] Transgenic plants provided herein have various uses in the agricultural and energy production industries. For example, transgenic plants described herein can be used to make animal feed and food products. Such plants, however, are often particularly useful as a feedstock for energy production.

[0241] Transgenic plants described herein often produce higher yields of grain and/or biomass per hectare, relative to control plants that lack the exogenous nucleic acid. In some embodiments, such transgenic plants provide equivalent or even increased yields of grain and/or biomass per hectare relative to control plants when grown under conditions of reduced inputs such as fertilizer and/or water. Thus, such transgenic plants can be used to provide yield stability at a lower input cost and/or under environmentally stressful conditions such as drought. In some embodiments, plants described herein have a composition that permits more efficient processing into free sugars, and subsequently ethanol, for energy production. In some embodiments, such plants provide higher yields of ethanol, other biofuel molecules, and/or sugar-derived co-products per kilogram of plant material, relative to control plants. By providing higher yields higher yields under environmentally stressful conditions such as drought conditions and/or heat shock conditions, the transgenic plants described herein improve profitability for farmers and processors as well as decrease costs to consumers.

[0242] Seeds from transgenic plants described herein can be conditioned and bagged in packaging material by means known in the art to form an article of manufacture. Packaging material such as paper and cloth are well known in the art. A package of seed can have a label, e.g., a tag or label secured to the packaging material, a label printed on the packaging material, or a label inserted within the package, that describes the nature of the seeds therein.

[0243] The invention will be further described in the following examples, which do not limit the scope of the invention described in the claims.

### VII. EXAMPLES

### Example 1

### Transgenic Arabidopsis Plants

[0244] The following symbols are used in the Examples with respect to Arabidopsis transformation: T₁: first generation transformant; T₂: second generation, progeny of self-pollinated T₁ plants; T₃: third generation, progeny of self-pollinated T₂ plants; T₄: fourth generation, progeny of self-pollinated T₃ plants. Independent transformations are referred to as events.

[0245] Nucleic acids that were isolated from Arabidopsis thaliana plants, and cloned into a Ti plasmid vector, CRS338, under the control of a 35S promoter, p32449 promoter, or p326 promoter, as indicated. Each construct contained a phosphinothricin acetyltransferase gene which confers Finale™ resistance to transformed plants. Wild-type Arabidopsis thaliana ecotype Wassilewskija (Ws) plants were transformed separately with each construct. The transformations were performed essentially as described in Bechtold et al., C.R. Acad. Sci. Paris, 316:1194-1199 (1993). introduced into Arabidopsis plants.

[0246] Transgenic Arabidopsis lines containing SEQ ID NO:441, SEQ ID NO:488, SEQ ID NO:567, SEQ ID NO:589, SEQ ID NO:704, SEQ ID NO:710, SEQ ID NO:1241, SEQ ID NO:1260, SEQ ID NO:1128, SEQ ID NO:59, SEQ ID NO:363, SEQ ID NO:310, SEQ ID NO:159, SEQ ID NO:1, SEQ ID NO:1008, or SEQ ID NO:56 were designated ME00029, ME00045, ME02190, ME02549, ME02865, ME03227, ME04477, ME18396, ME20095, ME02932, ME18240, ME20867, ME03268, ME06551, ME02401, or ME06919, respectively. The presence of each vector containing a nucleic acid described above in the respective transgenic Arabidopsis line transformed with the vector was confirmed by Finale™ resistance, PCR amplification from green leaf tissue extract, and/or sequencing of PCR products.

### Example 2

### Screening for Drought Tolerance in Transgenic Arabidopsis Seedlings

[0247] Soil was made from 60% Sunshine Mix #5 (Sun Gro; Bellevue, Wash., USA) and 40% vermiculite. For each superpool, 3 flats were seeded with about 3000 seeds. Prior to seeding, each flat was watered with 2 L of filtered water and the surface was misted. The flats were covered with a humidity dome and kept in the dark at 4° C. for 3 days.

[0248] After 3 days of cold treatment, the flats covered with humidity domes were transferred to a greenhouse and covered with a shade cloth (day 1). The humidity domes were removed on day 4, or when cotyledons are fully expanded. Each flat was watered with 2 L water within 1 day of removing the humidity domes by adding filtered water to the bottom of the flat and allowing 30-45 minutes for absorption of the water. On days 6 and 8, the flats were assessed for Finale™ resistance. On day 10, the no-hole flats were removed from the bottom of each flat to speed soil drying. The flats were watered in no-hole flats as above after 2.5 weeks and 4 weeks. Candidates with increased height, increased branching, normal siliques, larger rosettes, and persistent flowering, as compared to the wild-type Ws seedlings that were grown and treated in the same conditions were selected for analysis in a chronic soil drought assay.

[0249] Chronic Soil Drought Assay

[0250] Soil was made from 60% Sunshine Mix #5 (Sun Gro; Bellevue, Wash., USA) and 40% vermiculite. For each candidate event, 24 pots were prepared in a 24-pot no-hole flat with 28 grams of dry soil in each pot, and 4 L of filtered water was added to the tray. The water was allowed to soak into the soil and the soil surface was misted before seeding. For each candidate event, 18 pots were seeded with 3-5 seeds each of candidate seeds and 6 pots were seeded with 3-5 seeds each of wild-type control seeds. The seeded pots were covered with a humidity dome and kept in the dark at 4° C. for 3 days.

[0251] After 3 days of cold treatment, the pots covered with humidity domes were transferred to a Conviron® growth chamber set at 22° C., 16:8 hour light:dark cycle, 70% humidity, and 120 μE light intensity. The humidity domes were removed on day 5, or when cotyledons are fully expanded. After removal of the domes, each pot was irrigated to saturation with 0.5× Hoagland's solution, allowing the excess solution to drain. Seedlings were then thinned to 1 per pot. On day 8 or 9, the pots were irrigated to saturation with filtered water, allowing the excess water to drain after about 30 minutes of soaking, and the weight of each 24-pot flat was recorded. Each pot contained about 107 g water at saturation. Each pot was allowed to dry to about 15% of saturation between waterings. 30 g of water was added at each watering. Rosette area was measured at day 19. On day 24, plants were staked and measurements were taken of the longest leaf and the plant height. Terminal plant height was measured at the cease of flowering. The plants were allowed to dry and seed weight was measured. Finale resistance of a cauline leaf was determined at day 24. Significance of drought tolerance measurements was assessed using a one-tailed Student's t-test, assuming unequal variance, at p≦0.5.

### Example 3

### Screening for Heat Tolerance in Transgenic Arabidopsis Seedlings

[0252] Agar plates were made from the media composed of 2.15 g/L MS salt (PhytoTechnology Laboratories®), 5 g/L sucrose (Sigma), 0.7% agar (PhytoTechnology Laboratories®), pH 5.7. For each superpool, 3000 seeds were sterilized using 30% Clorox containing 0.1% Triton X-100 and plated onto two agar plates at a density of 1500 seeds per plate. The plates were wrapped with vent tape and kept in the dark at 4° C. for 3 days.

[0253] After 3 days of stratification, the plates were transferred to a Conviron® growth chamber set at 22° C., 16:8 hour light:dark cycle, 70% humidity, and 60 μE light intensity. The seedlings were grown in the chamber for 3.5-4 days. For heat shock, the plates were placed in an incubator set at 47° C. for 2 hours. After heat shock, the plates were transferred back to the Conviron® growth chamber and the seedlings were allowed to recover and grow for several days (about 7 days). Candidates with enhanced root growth and greenness of leaves, faster emergence of photosynthetically active true leaves and increased size of rosettes, as compared to the wild-type Ws seedlings that were grown and treated in the same conditions were selected for analysis in a heat shock assay.

[0254] Heat Shock I Assay

[0255] Seeds were plated on heat germination agar plates containing 45 mL of half-strength MS medium (2.15 g MS salt (PhytoTechnology Laboratories®), 5 g sucrose (Sigma), and 0.7% agar (PhytoTechnology Laboratories®) per liter, pH 5.7) per Petri dish (square, 100 mm×15 mm). One transgenic event (40 seeds) and 9 wild-type Ws control seeds were plated on each plate. Plates were wrapped with vent tape and placed in the dark at 4° C. for 3 days. Plates were then transferred into a Conviron® growth chamber set at 22° C., 16:8 hour light:dark cycle, and 70% humidity with fluorescent lamps emitting a light intensity of about 60 μE.

[0256] After the plants were grown in the Conviron® growth chamber for 3-4 days, the plates were treated at 47° C. in a Yamato IC800 incubator for 1 hour 50 minutes. Following the heat treatment, the plates were placed immediately back into the Conviron® growth chamber. On the 7th, 9th, and 11th day at 22° C. after the heat treatment, the plates were scanned using Epson Perfection 4870 scanner. The area of each seedling (green area) was quantified using the WinRhizo software (Regent Instruments). The transgenic status of each plant was assessed by Finale™ resistance.

[0257] The seedling area (a measure of growth after heat treatment) of transgenic plants was compared to that of the pooled controls comprising non-transgenic segregants and wild-type Ws controls grown on the same plate. Significance of heat tolerance was assessed using a one-tailed Student's t-test, assuming unequal variance, at p≦0.5.

[0258] Heat Shock II Assay

[0259] Seeds were plated on heat germination agar plates containing 45 mL of half-strength MS medium (2.15 g MS salt (PhytoTechnology Laboratories®), 5 g sucrose (Sigma-Aldrich®), and 0.7% agar (PhytoTechnology Laboratories®) per liter, pH 5.7) per Petri dish (square, 100 mm×15 mm). One transgenic event (30 seeds), 4 wild-type Ws control seeds, and 2 seeds of a transgenic positive control were plated on each plate. Plates were wrapped with vent tape and placed in the dark at 4° C. for 3 days. Plates were then transferred into a Conviron® growth chamber set at 22° C., 16:8 hour light:dark cycle, and 70% humidity with fluorescent lamps emitting a light intensity of about 60 μE.

[0260] After the plants were grown in the Conviron® growth chamber for 11 days, the plates were scanned using a CF imager (Technologica) to record the PSII operating efficiency (ΔΦ_{PSII}) and seedling area. The plates were then transferred to a Conviron® reach-in heat chamber set at 42° C. for 5 hours. Following the heat treatment, the plants were immediately scanned using the CF imager, and then transferred back into the Conviron® growth chamber. After 2 and 4 days of recovery in the growth chamber, the plates were scanned using the CF imager again. The transgenic status of each plant was assessed by Finale™ resistance.

[0261] The differences in the PSII operating efficiency and seedling size prior to heat shock, immediately after heat shock, and after recovery following heat shock were calculated. The differences in the PSII operating efficiency and seedling size of transgenic plants were compared to the pooled controls comprising non-transgenic segregants and wild-type Ws controls grown on the same plate. Significance of heat tolerance was assessed using a one-tailed Student's t-test, assuming unequal variance, at p≦0.5.

### Example 4

### Results for ME00029 Events

[0262] T₂ and T₃ seed from two events of ME00029 containing SEQ ID NO:441 under control of a p32449 promoter was analyzed for rosette area, terminal plant height, and seed yield as described in Example 2. The results are provided in Table 1.

TABLE 1
Chronic drought response of seedlings from ME00029

| | | Control Population | |
|---|---|---|---|
| Plants | Measurement | Internal | Pooled |
| T₂ seedlings from event -01 of | Rosette Area | N.S. | Sig. |
| ME00029 | | | |
| T₂ seedlings from event -04 of | Rosette Area | N.A. | Sig. |
| ME00029 | | | |
| T₂ seedlings from event -01 of | Longest Leaf | N.S. | Sig. |
| ME00029 | | | |
| T₂ seedlings from event -01 of | Terminal Plant | Sig. | Sig. |
| ME00029 | Height | | |
| T₃ seedlings from event -01 of | Terminal Plant | Sig. | Sig. |
| ME00029 | Height | | |
| T₂ seedlings from event -04 of | Terminal Plant | N.A. | Sig. |
| ME00029 | Height | | |
| T₃ seedlings from event -04 of | Terminal Plant | N.A. | Sig. |
| ME00029 | Height | | |
| T₃ seedlings from event -01 of | Seed Yield | N.S. | Sig. |
| ME00029 | | | |

N.A.—results not available due to insufficient sample size (n < 5);
N.S.—not significant;
Sig.—significant (p ≦ 0.5).

### Example 5

### Results for ME00045 Events

[0263] T₂ and T₃ seed from three events of ME00045 containing SEQ ID NO:488 under control of a p32449 promoter was analyzed for rosette area, terminal plant height, longest leaf length, and seed yield as described in Example 2. The results are provided in Table 2.

TABLE 2
Chronic drought response of seedlings from ME00045

| | | Control Population | | |
|---|---|---|---|---|
| Plants | Measurement | Internal | Pooled | Ws |
| T₃ seedlings from event -02 of | Rosette Area | N.S. | N.S. | Sig. |
| ME00045 | | | | |
| T₃ seedlings from event -02 of | Rosette Area | N.S. | N.S. | N.S. |
| ME00045 | | | | |
| T₂ seedlings from event -07 of | Rosette Area | N.A. | N.S. | Sig. |
| ME00045 | | | | |
| T₂ seedlings from event -07 of | Rosette Area | N.S. | N.S. | Sig. |
| ME00045 | | | | |
| T₂ seedlings from event -08 of | Rosette Area | N.A. | N.S. | Sig. |
| ME00045 | | | | |
| T₂ seedlings from event -08 of | Rosette Area | N.S. | N.S. | N.S. |
| ME00045 | | | | |
| T₃ seedlings from event -02 of | Longest Leaf | Sig. | Sig. | Sig. |
| ME00045 | | | | |
| T₃ seedlings from event -02 of | Longest Leaf | N.S. | N.S. | N.S. |
| ME00045 | | | | |
| T₂ seedlings from event -07 of | Longest Leaf | N.A. | N.S. | Sig. |
| ME00045 | | | | |
| T₂ seedlings from event -07 of | Longest Leaf | N.S. | N.S. | N.S. |
| ME00045 | | | | |
| T₂ seedlings from event -08 of | Longest Leaf | N.A. | N.S. | Sig. |
| ME00045 | | | | |
| T₂ seedlings from event -08 of | Longest Leaf | N.S. | N.S. | N.S. |
| ME00045 | | | | |
| T₃ seedlings from event -02 of | Terminal Plant | N.S. | N.S. | N.S. |
| ME00045 | Height | | | |
| T₃ seedlings from event -02 of | Terminal Plant | N.S. | N.S. | N.S.* |
| ME00045 | Height | | | |
| T₂ seedlings from event -07 of | Terminal Plant | N.A. | Sig. | Sig. |
| ME00045 | Height | | | |
| T₂ seedlings from event -07 of | Terminal Plant | N.S. | Sig. | Sig. |
| ME00045 | Height | | | |
| T₂ seedlings from event -08 of | Terminal Plant | N.A. | N.S.* | N.S. |
| ME00045 | Height | | | |
| T₂ seedlings from event -08 of | Terminal Plant | N.S. | N.S. | Sig. |
| ME00045 | Height | | | |
| T₃ seedlings from event -02 of | Seed Yield | Sig. | N.S.* | Sig. |
| ME00045 | | | | |
| T₃ seedlings from event -02 of | Seed Yield | N.S. | N.S. | N.S. |
| ME00045 | | | | |
| T₂ seedlings from event -07 of | Seed Yield | N.A. | N.S. | N.S. |
| ME00045 | | | | |
| T₂ seedlings from event -07 of | Seed Yield | N.S. | N.S. | N.S. |
| ME00045 | | | | |
| T₂ seedlings from event -08 of | Seed Yield | N.A. | N.S.* | Sig. |
| ME00045 | | | | |
| T₂ seedlings from event -08 of | Seed Yield | N.S. | N.S. | Sig. |
| ME00045 | | | | |

N.A.—results not available due to insufficient sample size;
N.S.—not significant (p > 0.10);
N.S.*—not significant (0.5 < p < 0.10);
Sig.—significant (p < 0.5).
Data in bold represents a second independent replicate.

### Example 6

### Results for ME02190 Events

[0264] T₂ and T₄ seed from two events of ME02190 containing SEQ ID NO:567 under control of a 35S promoter was analyzed for rosette area, terminal plant height, and longest leaf length as described in Example 2. The results are provided in Table 3.

TABLE 3
Chronic drought response of seedlings from ME02190

| | | Control Population | |
|---|---|---|---|
| Plants | Measurement | Internal | Pooled |
| T₂ seedlings from event -10 of | Rosette Area | N.S. | Sig. |
| ME02190 | | | |
| T₄ seedlings from event -02 of | Longest Leaf | N.A. | Sig. |
| ME02190 | | | |
| T₂ seedlings from event -10 of | Longest Leaf | N.S. | Sig. |
| ME02190 | | | |
| T₄ seedlings from event -02 of | Terminal Plant | N.A. | Sig. |
| ME02190 | Height | | |
| T₂ seedlings from event -10 of | Terminal Plant | N.S. | Sig. |
| ME02190 | Height | | |

N.A.—results not available due to insufficient sample size (n < 5);
N.S.—not significant;
Sig.—significant (p ≦ 0.5).

### Example 7

### Results for ME02549 Events

[0265] T₂ and T₃ seed from three events of ME02549 containing SEQ ID NO:589 under control of a 35S promoter was analyzed for rosette area, terminal plant height, and longest leaf length as described in Example 2. The results are provided in Table 4.

TABLE 4
Chronic drought response of seedlings from ME02549

| | | Control Population | | |
|---|---|---|---|---|
| Plants | Measurement | Internal | Pooled | Ws |
| T₂ seedlings from event -01 of | Rosette Area | Sig. | N.S. | Sig. |
| ME02549 | | | | |
| T₃ seedlings from event -01 of | Rosette Area | Sig. | N.S. | N.S. |
| ME02549 | | | | |
| T₂ seedlings from event -02 of | Rosette Area | N.S.* | N.S.* | Sig. |
| ME02549 | | | | |
| T₃ seedlings from event -02 of | Rosette Area | N.S. | N.S. | Sig. |
| ME02549 | | | | |
| T₂ seedlings from event -05 of | Rosette Area | N.A. | N.S. | Sig. |
| ME02549 | | | | |
| T₃ seedlings from event -05 of | Rosette Area | N.S. | N.S.* | Sig. |
| ME02549 | | | | |
| T₃ seedlings from event -01 of | Longest Leaf | N.S. | N.S. | Sig. |
| ME02549 | | | | |
| T₃ seedlings from event -02 of | Longest Leaf | N.S. | N.S. | Sig. |
| ME02549 | | | | |
| T₃ seedlings from event -05 of | Longest Leaf | N.S. | N.S. | Sig. |
| ME02549 | | | | |
| T₂ seedlings from event -01 of | Terminal Plant | N.A. | N.S. | N.S. |
| ME02549 | Height | | | |
| T₃ seedlings from event -01 of | Terminal Plant | N.S. | N.S. | Sig. |
| ME02549 | Height | | | |
| T₃ seedlings from event -02 of | Terminal Plant | N.S. | Sig. | Sig. |
| ME02549 | Height | | | |
| T₂ seedlings from event -05 of | Terminal Plant | N.A. | N.S. | N.S. |
| ME02549 | Height | | | |
| T₃ seedlings from event -05 of | Terminal Plant | Sig. | N.S. | Sig. |
| ME02549 | Height | | | |

N.A.—results not available due to insufficient sample size (n < 5);
N.S.—not significant;
N.S.*—not significant (0.5 < p < 0.10);
Sig.—significant (p < 0.5).

### Example 8

### Results for ME02865 Events

[0266] T₂ and T₃ seed from two events of ME02865 containing SEQ ID NO:704 under control of a 35S promoter was analyzed for rosette area, terminal plant height, longest leaf length, and seed weight as described in Example 2. The results are provided in Table 5.

TABLE 5
Chronic drought response of seedlings from ME02865

| | | Control Population | |
|---|---|---|---|
| Plants | Measurement | Internal | Pooled |
| T₂ seedlings from event -02 of | Rosette Area | N.S. | N.S. |
| ME02865 | | | |
| T₃ seedlings from event -02-01 of | Rosette Area | — | N.S. |
| ME02865 | | | |
| T₃ seedlings from event -02-02 of | Rosette Area | N.S. | N.S. |
| ME02865 | | | |
| T₂ seedlings from event -05 of | Rosette Area | — | Sig. |
| ME02865 | | | |
| T₃ seedlings from event -05-01 of | Rosette Area | — | Sig. |
| ME02865 | | | |
| T₃ seedlings from event -05-02 of | Rosette Area | N.S. | N.S. |
| ME02865 | | | |
| T₂ seedlings from event -02 of | Longest Leaf | N.S. | N.S. |
| ME02865 | | | |
| T₃ seedlings from event -02-01 of | Longest Leaf | — | N.S. |
| ME02865 | | | |
| T₃ seedlings from event -02-02 of | Longest Leaf | N.S.* | Sig. |
| ME02865 | | | |
| T₂ seedlings from event -05 of | Longest Leaf | — | Sig. |
| ME02865 | | | |
| T₃ seedlings from event -05-01 of | Longest Leaf | — | N.S. |
| ME02865 | | | |
| T₃ seedlings from event -05-02 of | Longest Leaf | N.S. | Sig. |
| ME02865 | | | |
| T₂ seedlings from event -02 of | Terminal Plant | Sig. | Sig. |
| ME02865 | Height | | |
| T₃ seedlings from event -02-01 of | Terminal Plant | — | N.S.* |
| ME02865 | Height | | |
| T₃ seedlings from event -02-02 of | Terminal Plant | N.S. | Sig. |
| ME02865 | Height | | |
| T₂ seedlings from event -05 of | Terminal Plant | — | Sig. |
| ME02865 | Height | | |
| T₃ seedlings from event -05-01 of | Terminal Plant | — | N.S.* |
| ME02865 | Height | | |
| T₃ seedlings from event -05-02 of | Terminal Plant | N.S.* | Sig. |
| ME02865 | Height | | |
| T₂ seedlings from event -02 of | Seed Weight | N.S. | N.S. |
| ME02865 | | | |
| T₃ seedlings from event -02-01 of | Seed Weight | — | N.S. |
| ME02865 | | | |
| T₃ seedlings from event -02-02 of | Seed Weight | Sig. | N.S. |
| ME02865 | | | |
| T₂ seedlings from event -05 of | Seed Weight | — | Sig. |
| ME02865 | | | |
| T₃ seedlings from event -05-01 of | Seed Weight | — | N.S. |
| ME02865 | | | |
| T₃ seedlings from event -05-02 of | Seed Weight | N.S. | N.S.* |
| ME02865 | | | |

N.A.—results not available due to insufficient sample size (n < 5);
N.S.—not significant;
N.S.*—not significant (0.5 < p < 0.10);
Sig.—significant (p < 0.5).

[0267] The physical appearances of T₁ ME02865 plants were similar to those of corresponding control plants grown under standard conditions. There were no observable or statistically significant differences between T₂ plants from events -02 and -05 of ME02865 and control plants in germination, onset of flowering, rosette area, fertility, and general morphology/architecture when grown under standard conditions.

### Example 9

### Results for ME03227 Events

[0268] T₂ and T₃ seed from two events of ME03227 containing SEQ ID NO:710 under control of a 35S promoter was analyzed for rosette area, terminal plant height, and longest leaf length as described in Example 2. The results are provided in Table 6.

TABLE 6
Chronic drought response of seedlings from ME03227

| | | Control Population | |
|---|---|---|---|
| Plants | Measurement | Internal | Pooled |
| T₂ seedlings from event -01 of | Rosette Area | N.A. | Sig. |
| ME03227 | | | |
| T₃ seedlings from event -01 of | Rosette Area | N.A. | Sig. |
| ME03227 | | | |
| T₂ seedlings from event -05 of | Rosette Area | N.A. | Sig. |
| ME03227 | | | |
| T₃ seedlings from event -05 of | Rosette Area | N.A. | Sig. |
| ME03227 | | | |
| T₃ seedlings from event -05 of | Longest Leaf | N.A. | Sig. |
| ME03227 | | | |
| T₃ seedlings from event -01 of | Terminal Plant | N.A. | N.S.* |
| ME03227 | Height | | |
| T₃ seedlings from event -05 of | Terminal Plant | N.A. | N.S.* |
| ME03227 | Height | | |

N.A.—results not available due to insufficient sample size (n < 5);
N.S.—not significant;
N.S.*—not significant (0.5 < p < 0.10);
Sig.—significant (p ≦ 0.5).

### Example 10

### Results for ME04477 Events

[0269] T₂ seed from five events of ME04477 containing SEQ ID NO:1241 under control of a 35S promoter was analyzed for rosette area, terminal plant height, and longest leaf length as described in Example 2. The results are provided in Table 7.

TABLE 7
Chronic drought response of seedlings from ME04477

| | | Control Population | |
|---|---|---|---|
| Plants | Measurement | Internal | Pooled |
| T₂ seedlings from event -03 of | Rosette Area | N.A. | Sig. |
| ME04477 | | | |
| T₂ seedlings from event -01 of | Longest Leaf | N.A. | Sig. |
| ME04477 | | | |
| T₂ seedlings from event -02 of | Longest Leaf | N.A. | Sig. |
| ME04477 | | | |
| T₂ seedlings from event -03 of | Longest Leaf | N.A. | Sig. |
| ME04477 | | | |
| T₂ seedlings from event -04 of | Longest Leaf | Sig. | Sig. |
| ME04477 | | | |
| T₂ seedlings from event -05 of | Longest Leaf | N.A. | Sig. |
| ME04477 | | | |
| T₂ seedlings from event -01 of | Terminal Plant | N.A. | Sig. |
| ME04477 | Height | | |
| T₂ seedlings from event -02 of | Terminal Plant | N.A. | Sig. |
| ME04477 | Height | | |
| T₂ seedlings from event -03 of | Terminal Plant | N.A. | Sig. |
| ME04477 | Height | | |
| T₂ seedlings from event -04 of | Terminal Plant | Sig. | Sig. |
| ME04477 | Height | | |
| T₂ seedlings from event -05 of | Terminal Plant | N.A. | Sig. |
| ME04477 | Height | | |

N.A.—results not available due to insufficient sample size (n < 5);
N.S.—not significant;
Sig.—significant (p < 0.5).

### Example 11

### Results for ME18396 Events

[0270] T₂ seed from one event of ME18396 containing SEQ ID NO:1260 under control of a p326 promoter was analyzed for rosette area and terminal plant height as described in Example 2. The results are provided in Table 8.

TABLE 8
Chronic drought response of seedlings from ME18396

| | | Control Population | |
|---|---|---|---|
| Plants | Measurement | Internal | Pooled |
| T₂ seedlings from event -02 of | Rosette Area | N.S. | Sig. |
| ME18396 | | | |
| T₂ seedlings from event -02 of | Terminal Plant | Sig. | Sig. |
| ME18396 | Height | | |

N.S.—not significant;
Sig.—significant (p < 0.5).

### Example 12

### Results for ME20095 Events

[0271] T₂ and T₃ seed from two events of ME20095 containing SEQ ID NO:1128 under control of a 35S promoter was analyzed for rosette area, longest leaf length, terminal plant height, and seed yield as described in Example 2. The results are provided in Table 9.

TABLE 9
Chronic drought response of seedlings from ME20095

| | | Control Population | |
|---|---|---|---|
| Plants | Measurement | Internal | Pooled |
| T₂ seedlings from event -01 of | Rosette Area | Sig. | Sig. |
| ME20095 | | | |
| T₃ seedlings from event -01-01 of | Rosette Area | N.S. | N.S. |
| ME20095 | | | |
| T₃ seedlings from event -01-02 of | Rosette Area | N.S. | N.S. |
| ME20095 | | | |
| T₂ seedlings from event -04 of | Rosette Area | Sig. | Sig. |
| ME20095 | | | |
| T₃ seedlings from event -04-01 of | Rosette Area | N.S. | N.S. |
| ME20095 | | | |
| T₃ seedlings from event -04-02 of | Rosette Area | N.S. | N.S.* |
| ME20095 | | | |
| T₂ seedlings from event -01 of | Longest Leaf | N.S. | Sig. |
| ME20095 | | | |
| T₃ seedlings from event -01-01 of | Longest Leaf | Sig. | Sig. |
| ME20095 | | | |
| T₃ seedlings from event -01-02 of | Longest Leaf | N.S. | N.S. |
| ME20095 | | | |
| T₂ seedlings from event -04 of | Longest Leaf | Sig. | Sig. |
| ME20095 | | | |
| T₃ seedlings from event -04-01 of | Longest Leaf | Sig. | Sig. |
| ME20095 | | | |
| T₃ seedlings from event -04-02 of | Longest Leaf | N.S.* | Sig. |
| ME20095 | | | |
| T₂ seedlings from event -01 of | Terminal Plant | N.S. | Sig. |
| ME20095 | Height | | |
| T₃ seedlings from event -01-01 of | Terminal Plant | N.S.* | Sig. |
| ME20095 | Height | | |
| T₃ seedlings from event -01-02 of | Terminal Plant | N.S. | N.S.* |
| ME20095 | Height | | |
| T₂ seedlings from event -04 of | Terminal Plant | Sig. | Sig. |
| ME20095 | Height | | |
| T₃ seedlings from event -04-01 of | Terminal Plant | Sig. | Sig. |
| ME20095 | Height | | |
| T₃ seedlings from event -04-02 of | Terminal Plant | N.S. | Sig. |
| ME20095 | Height | | |
| T₂ seedlings from event -01 of | Seed Weight | Sig. | Sig. |
| ME20095 | | | |
| T₃ seedlings from event -01-01 of | Seed Weight | Sig. | N.S.* |
| ME20095 | | | |
| T₃ seedlings from event -01-02 of | Seed Weight | Sig. | Sig. |
| ME20095 | | | |
| T₂ seedlings from event -04 of | Seed Weight | N.S. | N.S. |
| ME20095 | | | |
| T₃ seedlings from event -04-01 of | Seed Weight | N.S. | N.S. |
| ME20095 | | | |
| T₃ seedlings from event -04-02 of | Seed Weight | N.S. | N.S. |
| ME20095 | | | |

N.S.—not significant;
N.S.*—not significant (0.5 < p < 0.10);
Sig.—significant (p < 0.5).

[0272] T₁ ME20095 plants showed delayed flowering and prolonged vegetative growth compared to corresponding control plants grown under standard conditions. There were no observable or statistically significant differences between T₂ plants from events -02 and -04 of ME20095 and control plants in germination, onset of flowering, fertility, and general morphology/architecture when grown under standard conditions. Rosette area in T2 plants from events -02 and -04 was significantly larger and seed yield was increased as compared to corresponding control plants grown under standard conditions.

### Example 13

### Results for ME02401 Events

[0273] T₂ and T₃ seed from two events of ME02401 containing SEQ ID NO:1188 under control of a 35S promoter was analyzed for rosette area, terminal plant height, and longest leaf length as described in Example 2. The results are provided in Table 10.

TABLE 10
Chronic drought response of seedlings from ME02401

| | | Control Population | |
|---|---|---|---|
| Plants | Measurement | Internal | Pooled |
| T₂ seedlings from event -05 of | Rosette Area | N.A. | N.S.* |
| ME02401 | | | |
| T₃ seedlings from event -01 of | Longest Leaf | N.S.* | Sig. |
| ME02401 | | | |
| T₂ seedlings from event -05 of | Longest Leaf | N.A. | Sig. |
| ME02401 | | | |
| T₃ seedlings from event -01 of | Terminal Plant | Sig. | Sig. |
| ME02401 | Height | | |
| T₂ seedlings from event -05 of | Terminal Plant | N.A. | Sig. |
| ME02401 | Height | | |

N.A.—results not available due to insufficient sample size (n < 5);
N.S.—not significant;
N.S.*—not significant (0.5 < p < 0.10);
Sig.—significant (p < 0.5).

### Example 14

### Results for ME02932 Events

[0274] T₂ and T₃ seed from two events of ME02932 containing SEQ ID NO:59 under control of a 35S promoter was analyzed for seedling area following a Heat Shock I assay as described in Example 3. The results are provided in Table 11.

TABLE 11
ME02932 seedling area following Heat Shock I assay

| | Average seedling | | | |
|---|---|---|---|---|
| Plants | area | SE | N | p-value |
| T₂ seedlings from event -01 of ME02932 | 0.07 | 0.008 | 33 | 8.77E−04 |
| T₂ non-transgenic segregants of event -01 of | 0.04 | 0.006 | 15 | |
| ME02932 | | | | |
| T₃ seedlings from event -01 of ME02932 | 0.10 | 0.003 | 40 | 2.21E−04 |
| T₃ non-transgenic segregants of event -01 of | 0.07 | 0.007 | 9 | |
| ME02932 | | | | |
| T₂ seedlings from event -03 of ME02932 | 0.08 | 0.012 | 21 | 1.29E−02 |
| T₂ non-transgenic segregants of event -03 of | 0.04 | 0.009 | 23 | |
| ME02932 | | | | |
| T₃ seedlings from event -03 of ME02932 | 0.09 | 0.004 | 36 | 1.54E−03 |
| T₃ non-transgenic segregants of event -03 of | 0.07 | 0.005 | 13 | |
| ME02932 | | | | |

[0275] The physical appearances of T₁ ME02932 plants were similar to those of corresponding control plants grown under standard conditions. There were no observable or statistically significant differences between T₂ plants from events -01 and -03 of ME02932 and control plants in germination, onset of flowering, rosette area, fertility, and general morphology/architecture when grown under standard conditions.

### Example 15

### Results for ME18240 Events

[0276] T₂ and T₃ seed from three events of ME18240 containing SEQ ID NO:363 under control of a 35S promoter was analyzed for seedling area following a Heat Shock I assay and change in photosynthetic activity during a Heat Shock II assay as described in Example 3. The results are provided in Tables 12 and 13.

TABLE 12
ME18240 seedling area following Heat Shock I assay

| | Average seedling | | | |
|---|---|---|---|---|
| Plants | area | SE | N | p-value |
| T₂ seedlings from event -02 of ME18240 | 0.08 | 0.007 | 27 | 4.22E−08 |
| T₂ non-transgenic segregants of event -02 of | 0.03 | 0.004 | 16 | |
| ME18240 | | | | |
| T₃ seedlings from event -02 of ME18240 | 0.14 | 0.007 | 31 | 5.83E−11 |
| T₃ non-transgenic segregants of event -02 of | 0.06 | 0.007 | 14 | |
| ME18240 | | | | |
| T₂ seedlings from event -03 of ME18240 | 0.13 | 0.007 | 35 | 3.31E−05 |
| T₂ non-transgenic segregants of event -03 of | 0.08 | 0.01 | 14 | |
| ME18240 | | | | |
| T₃ seedlings from event -03 of ME18240 | 0.14 | 0.008 | 28 | 5.13E−06 |
| T₃ non-transgenic segregants of event -03 of | 0.09 | 0.008 | 19 | |
| ME18240 | | | | |
| T₂ seedlings from event -04 of ME18240 | 0.13 | 0.008 | 33 | 2.39E−07 |
| T₂ non-transgenic segregants of event -04 of | 0.06 | 0.009 | 16 | |
| ME18240 | | | | |
| T₃ seedlings from event -04 of ME18240 | 0.13 | 0.008 | 29 | 4.68E−05 |
| T₃ non-transgenic segregants of event -04 of | 0.08 | 0.008 | 18 | |
| ME18240 | | | | |

TABLE 13
ME18240 ΔFv/Fm in response to Heat Shock II assay

| | Average | | | |
|---|---|---|---|---|
| Plants | ΔFv/Fm | SE | N | p-value |
| T₂ seedlings from event -02 of ME18240 | 0.24 | 0.013 | 47 | 3.64E−05 |
| T₂ non-transgenic segregants of event -02 of | 0.32 | 0.016 | 25 | |
| ME18240 | | | | |
| T₃ seedlings from event -02 of ME18240 | 0.36 | 0.012 | 43 | 1.92E−04 |
| T₃ non-transgenic segregants of event -02 of | 0.43 | 0.016 | 22 | |
| ME18240 | | | | |
| T₂ seedlings from event -03 of ME18240 | 0.24 | 0.010 | 41 | 9.27E−11 |
| T₂ non-transgenic segregants of event -03 of | 0.37 | 0.011 | 28 | |
| ME18240 | | | | |
| T₃ seedlings from event -03 of ME18240 | 0.33 | 0.011 | 24 | 1.91E−02 |
| T₃ non-transgenic segregants of event -03 of | 0.39 | 0.022 | 10 | |
| ME18240 | | | | |
| T₂ seedlings from event -04 of ME18240 | 0.21 | 0.009 | 43 | 5.55E−17 |
| T₂ non-transgenic segregants of event -04 of | 0.40 | 0.007 | 29 | |
| ME18240 | | | | |
| T₃ seedlings from event -04 of ME18240 | 0.28 | 0.011 | 46 | 9.38E−11 |
| T₃ non-transgenic segregants of event -04 of | 0.41 | 0.008 | 21 | |
| ME18240 | | | | |

Where ΔFv/Fm = Fv/Fm prior to heat shock − Fv/Fm after heat shock.

[0277] The physical appearances of T₁ ME18240 plants were similar to those of corresponding control plants grown under standard conditions. There were no observable or statistically significant differences between T₂ plants from events -02, -03, and -04 of ME18240 and control plants in germination, onset of flowering, rosette area, fertility, and general morphology/architecture when grown under standard conditions.

### Example 16

### Results for ME20867 Events

[0278] T₂ and T₃ seed from four events of ME20867 containing SEQ ID NO:310 under control of a 35S promoter was analyzed for seedling area following a Heat Shock I assay and change in photosynthetic activity during a Heat Shock II assay as described in Example 3. The results are provided in Tables 14 and 15.

TABLE 14
ME20867 seedling area in response to Heat Shock I assay

| | Average seedling | | | |
|---|---|---|---|---|
| Plants | area | SE | N | p-value |
| T₂ seedlings from event -01 of ME20867 | 0.14 | 0.008 | 28 | 4.86E−07 |
| T₂ non-transgenic segregants of event -01 of | 0.07 | 0.011 | 12 | |
| ME20867 | | | | |
| T₃ seedlings from event -01 of ME20867 | 0.07 | 0.007 | 31 | 9.84E−10 |
| T₃ non-transgenic segregants of event -01 of | 0.01 | 0.010 | 16 | |
| ME20867 | | | | |
| T₂ seedlings from event -02 of ME20867 | 0.13 | 0.006 | 37 | 1.03E−02 |
| T₂ non-transgenic segregants of event -02 of | 0.08 | 0.024 | 3 | |
| ME20867 | | | | |
| T₃ seedlings from event -02 of ME20867 | 0.09 | 0.006 | 32 | 6.01E−07 |
| T₃ non-transgenic segregants of event -02 of | 0.02 | 0.011 | 9 | |
| ME20867 | | | | |
| T₂ seedlings from event -04 of ME20867 | 0.12 | 0.006 | 31 | 1.47E−02 |
| T₂ non-transgenic segregants of event -04 of | 0.10 | 0.010 | 9 | |
| ME20867 | | | | |
| T₃ seedlings from event -04 of ME20867 | 0.03 | 0.005 | 20 | 2.14E−04 |
| T₃ non-transgenic segregants of event -04 of | 0.01 | 0.007 | 12 | |
| ME20867 | | | | |
| T₂ seedlings from event -05 of ME20867 | 0.11 | 0.009 | 30 | 1.51E−02 |
| T₂ non-transgenic segregants of event -05 of | 0.08 | 0.012 | 10 | |
| ME20867 | | | | |
| T₃ seedlings from event -05 of ME20867 | 0.03 | 0.004 | 23 | 1.98E−04 |
| T₃ non-transgenic segregants of event -05 of | 0.01 | 0.005 | 20 | |
| ME20867 | | | | |

TABLE 15
ME20867 ΔFv/Fm-D₂ in response to Heat Shock II assay

| | Average | | | |
|---|---|---|---|---|
| Plants | ΔFv/Fm-D₂ | SE | N | p-value |
| T₂ seedlings from event -01 of ME20867 | 0.03 | 0.012 | 33 | 2.17E−08 |
| T₂ non-transgenic segregants of event -01 of | −0.07 | 0.008 | 12 | |
| ME20867 | | | | |
| T₃ seedlings from event -01 of ME20867 | 0.21 | 0.010 | 44 | 3.71E−12 |
| T₃ non-transgenic segregants of event -01 of | 0.06 | 0.015 | 22 | |
| ME20867 | | | | |
| T₂ seedlings from event -02 of ME20867 | 0.06 | 0.011 | 25 | 9.39E−11 |
| T₂ non-transgenic segregants of event -02 of | −0.10 | 0.006 | 12 | |
| ME20867 | | | | |
| T₃ seedlings from event -02 of ME20867 | 0.25 | 0.012 | 50 | 4.79E−08 |
| T₃ non-transgenic segregants of event -02 of | 0.06 | 0.029 | 16 | |
| ME20867 | | | | |
| T₂ seedlings from event -04 of ME20867 | 0.17 | 0.010 | 43 | 8.71E−11 |
| T₂ non-transgenic segregants of event -04 of | 0.03 | 0.014 | 22 | |
| ME20867 | | | | |
| T₃ seedlings from event -04 of ME20867 | 0.16 | 0.011 | 24 | 1.39E−03 |
| T₃ non-transgenic segregants of event -04 of | 0.06 | 0.027 | 9 | |
| ME20867 | | | | |
| T₂ seedlings from event -05 of ME20867 | 0.21 | 0.016 | 28 | 1.35E−09 |
| T₂ non-transgenic segregants of event -05 of | 0.07 | 0.012 | 31 | |
| ME20867 | | | | |
| T₃ seedlings from event -05 of ME20867 | 0.24 | 0.015 | 19 | 3.72E−03 |
| T₃ non-transgenic segregants of event -05 of | 0.18 | 0.015 | 14 | |
| ME20867 | | | | |

ΔFv/Fm-D₂ = Fv/Fm immediately after heat shock − Fv/Fm after 2 days recovery.

[0279] The physical appearances of T₁ ME20867 plants were similar to those of corresponding control plants grown under standard conditions. There were no observable or statistically significant differences between T₂ plants from events -01, -02, -04 and -05 of ME20867 and control plants in germination, onset of flowering, rosette area, fertility, and general morphology/architecture when grown under standard conditions.

### Example 17

### Results for ME03268 Events

[0280] T₂ and T₃ seed from one event of ME03268, and T₃ and T₄ seed from one event of ME03268, each containing SEQ ID NO:159 under control of a 35S promoter, was analyzed for seedling area following a Heat Shock I assay as described in Example 3. The results are provided in Table 16.

TABLE 16
ME03268 seedling area in response to Heat Shock I assay

| | Average seedling | | | |
|---|---|---|---|---|
| Plants | area | SE | N | p-value |
| T₂ seedlings from event -02 of ME03268 | 0.165 | 0.015 | 26 | 1.09E−03 |
| T₂ non-transgenic segregants of event -02 of | 0.070 | 0.024 | 3 | |
| ME03268 | | | | |
| T₃ seedlings from event -02 of ME03268 | 0.137 | 0.009 | 40 | 1.97E−07 |
| T₃ non-transgenic segregants of event -02 of | 0.048 | 0.012 | 9 | |
| ME03268 | | | | |
| T₃ seedlings from event -03 of ME03268 | 0.062 | 0.007 | 26 | 3.65E−02 |
| T₃ non-transgenic segregants of event -03 of | 0.037 | 0.011 | 4 | |
| ME03268 | | | | |
| T₄ seedlings from event -03 of ME03268 | 0.094 | 0.008 | 30 | 3.96E−03 |
| T₄ non-transgenic segregants of event -03 of | 0.054 | 0.012 | 10 | |
| ME03268 | | | | |

[0281] The physical appearances of T₁ ME03268 plants were similar to those of corresponding control plants grown under standard conditions. There were no observable or statistically significant differences between T₂ plants from events -02 and -03 of ME03268 and control plants in germination, onset of flowering, rosette area, fertility, and general morphology/architecture when grown under standard conditions.

### Example 18

### Results for ME06551 Events

[0282] T₃ and T₄ seed from two events of ME06551 containing SEQ ID NO:1 under control of a 35S promoter was analyzed for change in photosynthetic activity during a Heat Shock II assay as described in Example 3. The results are provided in Table17.

TABLE 17
ME06551 ΔFv/Fm in response to Heat Shock II assay

| | Average | | | |
|---|---|---|---|---|
| Plants | ΔFv/Fm | SE | N | p-value |
| T₃ seedlings from event -04 of ME06551 | 0.42 | 0.016 | 11 | 1.32E−02 |
| T₃ non-transgenic segregants of event -04 of | 0.47 | 0.012 | 15 | |
| ME06551 | | | | |
| T₄ seedlings from event -04 of ME06551 | 0.39 | 0.006 | 49 | 4.73E−03 |
| T₄ non-transgenic segregants of event -04 of | 0.43 | 0.014 | 11 | |
| ME06551 | | | | |
| T₃ seedlings from event -05 of ME06551 | 0.39 | 0.013 | 11 | 4.21E−04 |
| T₃ non-transgenic segregants of event -05 of | 0.46 | 0.010 | 13 | |
| ME06551 | | | | |
| T₄ seedlings from event -05 of ME06551 | 0.39 | 0.007 | 50 | 4.79E−02 |
| T₄ non-transgenic segregants of event -05 of | 0.41 | 0.010 | 17 | |
| ME06551 | | | | |

Where ΔFv/Fm = Fv/Fm prior to heat shock − Fv/Fm after heat shock.

[0283] The physical appearances of T₁ ME06551 plants were similar to those of corresponding control plants grown under standard conditions. There were no observable or statistically significant differences between T₂ plants from events -04 and -05 of ME06551 and control plants in germination, onset of flowering, rosette area, fertility, and general morphology/architecture when grown under standard conditions.

### Example 19

### Results for ME06919 Events

[0284] T₂ and T₃ seed from two events of ME06919 containing SEQ ID NO:56 under control of a 35S promoter was analyzed for change in photosynthetic activity during a Heat Shock II assay as described in Example 3. The results are provided in Table 18.

TABLE 18
ME06919 ΔFv/Fm in response to Heat Shock II assay

| | Average | | | |
|---|---|---|---|---|
| Plants | ΔFv/Fm | SE | N | p-value |
| T₂ seedlings from event -03 of ME06919 | 0.433 | 0.007 | 65 | 2.55E−09 |
| T₂ non-transgenic segregants of event -03 of | 0.497 | 0.008 | 37 | |
| ME06919 | | | | |
| T₃ seedlings from event -03 of ME06919 | 0.281 | 0.013 | 46 | 1.87E−03 |
| T₃ non-transgenic segregants of event -03 of | 0.341 | 0.015 | 18 | |
| ME06919 | | | | |
| T₂ seedlings from event -04 of ME06919 | 0.490 | 0.007 | 21 | 3.06E−04 |
| T₂ non-transgenic segregants of event -04 of | 0.531 | 0.009 | 26 | |
| ME06919 | | | | |
| T₃ seedlings from event -04 of ME06919 | 0.296 | 0.006 | 44 | 6.15E−08 |
| T₃ non-transgenic segregants of event -04 of | 0.412 | 0.018 | 18 | |
| ME06919 | | | | |

Where ΔFv/Fm = Fv/Fm prior to heat shock − Fv/Fm after heat shock.

[0285] The physical appearances of T₁ ME06919 plants were similar to those of corresponding control plants grown under standard conditions. There were no observable or statistically significant differences between T₂ plants from events -03 and -04 of ME06919 and control plants in germination, onset of flowering, rosette area, fertility, and general morphology/architecture when grown under standard conditions.

### Example 20

### Results for ME04246 Events

[0286] T₂ and T₃ seed from two events of ME04246 containing SEQ ID NO:1362 under control of a 35S promoter was analyzed for rosette area, terminal plant height, and longest leaf length as described in Example 2. The results are provided in Table 19.

TABLE 19
Chronic drought response of seedlings from ME04246

| | | Control Population | | |
|---|---|---|---|---|
| Plants | Measurement | Internal | Pooled | Ws |
| T₂ seedlings from event -01 of ME04246 | Longest Leaf | Sig. | Sig. | N.S. |
| T₂ seedlings from event -03 of ME04246 | Longest Leaf | N.S. | N.S. | N.S. |
| T₂ seedlings from event -04 of ME04246 | Longest Leaf | N.S. | N.S. | N.S. |
| T₂ seedlings from event -01 of ME04246 | Dry Biomass | N.A. | N.S.* | Sig. |
| T₂ seedlings from event -02 of ME04246 | Dry Biomass | N.A. | N.A. | N.S. |
| T₂ seedlings from event -04 of ME04246 | Dry Biomass | N.A. | N.S.* | Sig. |

N.A.—results not available due to insufficient sample size (n < 5);
N.S.—not significant;
N.S.*—not significant (0.5 < p < 0.10);
Sig.—significant (p < 0.5).

[0287] T₂ ME04246 plants showed increased vegetative biomass compared to corresponding control plants under water-limiting conditions as measured directly and to a lesser degree by longest leaf length. There were no observable or statistically significant differences between T₁ plants from events -01, -03 and -04 of ME04246 and control plants in germination, onset of flowering, fertility, and general morphology/architecture when grown under standard conditions.

### Example 21

### Determination of Functional Homologs by Reciprocal BLAST

[0288] A candidate sequence was considered a functional homolog of a reference sequence if the candidate and reference sequences encoded proteins having a similar function and/or activity. A process known as Reciprocal BLAST (Rivera et al., Proc. Natl. Acad. Sci. USA, 95:6239-6244 (1998)) was used to identify potential functional homolog sequences from databases consisting of all available public and proprietary peptide sequences, including NR from NCBI and peptide translations from Ceres clones.

[0289] Before starting a Reciprocal BLAST process, a specific reference polypeptide was searched against all peptides from its source species using BLAST in order to identify polypeptides having BLAST sequence identity of 80% or greater to the reference polypeptide and an alignment length of 85% or greater along the shorter sequence in the alignment. The reference polypeptide and any of the aforementioned identified polypeptides were designated as a cluster.

[0290] The BLASTP version 2.0 program from Washington University at Saint Louis, Mo., USA was used to determine BLAST sequence identity and E-value. The BLASTP version 2.0 program includes the following parameters: 1) an E-value cutoff of 1.0e-5; 2) a word size of 5; and 3) the -postsw option. The BLAST sequence identity was calculated based on the alignment of the first BLAST HSP (High-scoring Segment Pairs) of the identified potential functional homolog sequence with a specific reference polypeptide. The number of identically matched residues in the BLAST HSP alignment was divided by the HSP length, and then multiplied by 100 to get the BLAST sequence identity. The HSP length typically included gaps in the alignment, but in some cases gaps were excluded.

[0291] The main Reciprocal BLAST process consists of two rounds of BLAST searches; forward search and reverse search. In the forward search step, a reference polypeptide sequence, “polypeptide A,” from source species SA was BLASTed against all protein sequences from a species of interest. Top hits were determined using an E-value cutoff of 10⁻⁵ and a sequence identity cutoff of 35%. Among the top hits, the sequence having the lowest E-value was designated as the best hit, and considered a potential functional homolog or ortholog. Any other top hit that had a sequence identity of 80% or greater to the best hit or to the original reference polypeptide was considered a potential functional homolog or ortholog as well. This process was repeated for all species of interest.

[0292] In the reverse search round, the top hits identified in the forward search from all species were BLASTed against all protein sequences from the source species SA. A top hit from the forward search that returned a polypeptide from the aforementioned cluster as its best hit was also considered as a potential functional homolog.

[0293] Functional homologs were identified by manual inspection of potential functional homolog sequences. Representative functional homologs for SEQ ID NO:442, SEQ ID NO:489, SEQ ID NO:568, SEQ ID NO:590, SEQ ID NO:705, SEQ ID NO:711, SEQ ID NO:742, SEQ ID NO:1012, SEQ ID NO:1129, SEQ ID NO:60, SEQ ID NO:364, SEQ ID NO:311, SEQ ID NO:160, SEQ ID NO:2, and SEQ ID NO:749 are shown in FIGS. 1-15, respectively.

### Example 22

### Determination of Functional Homologs by Hidden Markov Models

[0294] Hidden Markov Models (HMMs) were generated by the program HMMER 2.3.2. To generate each HMM, the default HMMER 2.3.2 program parameters, configured for global alignments, were used.

[0295] An HMM was generated using the sequences shown in FIG. 1 as input. These sequences were fitted to the model and a representative HMM bit score for each sequence is shown in the Sequence Listing. Additional sequences were fitted to the model, and representative HMM bit scores for any such additional sequences are shown in the Sequence Listing. The results indicate that these additional sequences are functional homologs of SEQ ID NO:442.

[0296] The procedure above was repeated and an HMM was generated for each group of sequences shown in FIGS. 2-15 using the sequences shown in each Figure as input for that HMM. A representative bit score for each sequence is shown in the Sequence Listing. Additional sequences were fitted to certain HMMs, and representative HMM bit scores for such additional sequences are shown in the Sequence Listing. The results indicate that these additional sequences are functional homologs of the sequences used to generate that HMM.

### Other Embodiments

[0297] It is to be understood that while the invention has been described in conjunction with the detailed description thereof, the foregoing description is intended to illustrate and not limit the scope of the invention, which is defined by the scope of the appended claims. Other aspects, advantages, and modifications are within the scope of the following claims.

1.-2. (canceled)

3. The method of claim 22, wherein the polypeptide comprises a sulfotransferase 1 domain having 70 percent or greater sequence identity to the sulfotransferase 1 domain of SEQ ID NO: 590, 591, 592, 593, 594, 595, 596, 597, 598, 599, 600, 602, 603, 604, 605, 607, 608, 610, 612, 614, 615, 616, 617, 618, 619, 620, 621, 623, 625, 627, 629, 631, 632, 634, 635, 636, 638, 640, 642, 644, 646, 647, 650, 651, 653, 654, 655, 656, 658, 660, 661, 662, 663, 664, 665, 666, 667, 668, 669, 671, 673, 674, 675, 676, 678, 680, 682, 684, 685, 687, 688, 690, 691, 692, 694, 696, 698, 700, 702, 971, 974, 975, 978, 979, 980, 981, 983, 985, 987, 995, or 997.

4. The method of claim 22, wherein the polypeptide comprises an AN1-like zinc finger domain having 70 percent or greater sequence identity to the AN1-like zinc finger domain of SEQ ID NO: 742, 743, 744, 745, 757, 759, 761, 763, 767, 771, 796, 798, 799, 801, 805, 807, 808, 809, 810, 811, 812, 813, 815, 816, 817, 819, 823, 825, 832, 834, 836, 839, 846, 848, 857, 859, 863, 885, 892, 900, 912, 918, 939, 944, 953, 955, 957, 973, 977, 988, 989, 990, 991, 992, 993, 999, 1000, 1010, 1242, 748, 749, 797, 803, 821, 1189, 1191, 1193, 1195, 1197, 1199, 1201, 1203, 1205, 1207, 1209, 1210, 1212, 1214, 1215, 1216, 1218, 1219, 1221, 1222, 1223, 1225, 1226, 1228, 1230, 1231, 1232, 1234, 1236, 1238, 1240, 1244, 1246, 1248, 1250, 1252, 1254, 1256, 1258, 1296, 1298, 1300, 1302, or 1304 and an A20-like zinc finger domain having 70 percent or greater sequence identity to the A20-like zinc finger domain of SEQ ID NO: 742, 743, 744, 745, 757, 759, 761, 763, 767, 771, 796, 798, 799, 801, 805, 807, 808, 809, 810, 811, 812, 813, 815, 816, 817, 819, 823, 825, 832, 834, 836, 839, 846, 848, 857, 859, 863, 885, 892, 900, 912, 918, 939, 944, 953, 955, 957, 973, 977, 988, 989, 990, 991, 992, 993, 999, 1000, 1010, 1242, 748, 749, 797, 803, 821, 1189, 1191, 1193, 1195, 1197, 1199, 1201, 1203, 1205, 1207, 1209, 1210, 1212, 1214, 1215, 1216, 1218, 1219, 1221, 1222, 1223, 1225, 1226, 1228, 1230, 1231, 1232, 1234, 1236, 1238, 1240, 1244, 1246, 1248, 1250, 1252, 1254, 1256, 1258, 1296, 1298, 1300, 1302, or 1304.

5. The method of claim 22, wherein the polypeptide comprises a short chain dehydrogenase domain having 70 percent or greater sequence identity to the short chain dehydrogenase domain of SEQ ID NO: 922, 924, 929, 931, 935, 937, 941, 943, 947, 949, 951, 952, 958, 959, 960, 961, 962, 963, 964, 1012, 1013, 1014, 1015, 1016, 1018, 1020, 1022, 1023, 1025, 1027, 1028, 1030, 1031, 1033, 1035, 1037, 1039, 1041, 1045, 1048, 1050, 1051, 1053, 1055, 1056, 1058, 1061, 1062, 1064, 1066, 1068, 1071, 1073, 1075, 1077, 1079, 1080, 1082, 1084, 1086, 1088, 1090, 1092, 1093, 1094, 1096, 1098, 1100, 1102, 1104, 1106, 1108, 1110, 1112, 1113, 1114, 1116, 1117, 1118, 1119, 1121, 1123, 1125, or 1292.

6. The method of claim 22, wherein the polypeptide comprises a trehalose-phosphatase domain having 70 percent or greater sequence identity to the trehalose-phosphatase domain of SEQ ID NO: 63, 73, 96, 127, 139, 179, 180, 209, 467, 559, 648, 726, 741, 765, 773, 781, 827, 829, 840, 841, 842, 843, 844, 845, 849, 850, 851, 852, 853, 854, 861, 865, 867, 896, 916, 926, 932, 933, 1043, 1046, 1059, 1069, 1129, 1130, 1131, 1132, 1133, 1134, 1135, 1136, 1137, 1138, 1140, 1142, 1144, 1146, 1148, 1150, 1151, 1152, 1153, 1154, 1156, 1157, 1158, 1159, 1160, 1161, 1162, 1164, 1166, 1168, 1170, 1172, 1174, 1175, 1177, 1179, 1181, 1182, 1184, 1186, or 1294.

7. The method of claim 22, wherein the polypeptide comprises a synaptobrevin-related polypeptide having 70 percent or greater sequence identity to the synaptobrevin-related polypeptide of SEQ ID NO: 160, 162, 164, 166, 168, 170, 172, 174, 176, 178, 182, 184, 186, 188, 190, 192, 194, 196, 198, 200, 202, 204, 206, 208, 212, 214, 216, 218, 220, 222, 224, 225, 228, 229, 231, 233, 234, 235, 237, 239, 240, 242, 244, 246, 248, 250, 252, 253, 254, 256, 258, 260, 262, 264, 266, 268, 269, 271, 273, 275, 277, 279, 280, 282, 284, 286, 288, 289, 290, 291, 292, 293, 294, 295, 296, 297, 298, 299, 300, 301, 302, 303, 304, 305, 307, 309, 998, 1001, 1003, 1005, 1007, 1188, 1262, 1264, 1265, 1267, 1269, 1271, 1273, 1274, 1276, 1277, 1279, 1281, 1283, 1285, 1286, 1287, 1288, or 1290.

8. The method of claim 22, wherein the polypeptide comprises an HSF-type DNA-binding domain having 70 percent or greater sequence identity to the HSF-type DNA-binding domain of SEQ ID NO: 364, 366, 368, 369, 370, 371, 373, 375, 377, 379, 381, 383, 385, 387, 389, 390, 392, 394, 396, 398, 400, 401, 402, 404, 405, 407, 408, 410, 412, 413, 414, 416, 418, 419, 420, 421, 422, 423, 424, 426, 428, 430, 431, 432, 433, 434, 435, 436, 438, 440, 753, 754, 755, 756, 760, 768, 769, 774, 775, 777, 779, 783, 785, 789, 791, 793, 945, 1293, 311, 312, 314, 315, 316, 317, 319, 320, 321, 322, 323, 325, 326, 327, 329, 330, 332, 334, 335, 336, 337, 338, 339, 340, 341, 343, 344, 346, 348, 349, 350, 351, 353, 355, 356, 358, 360, 362, 876, 878, 880, 882, 886, 887, 888, 889, 890, 891, 893, 894, 897, 898, or 901.

9. The method of claim 22, wherein the polypeptide comprises a DnaJ domain having 70 percent or greater sequence identity to the DnaJ domain of SEQ ID NO: 60, 62, 64, 65, 66, 67, 68, 69, 70, 71, 74, 76, 78, 80, 82, 84, 86, 88, 90, 92, 94, 98, 100, 102, 104, 106, 108, 110, 112, 114, 116, 118, 120, 122, 124, 126, 130, 132, 134, 136, 138, 142, 144, 146, 148, 150, 152, 154, 156, 158, or 915.

10. The method of claim 22, wherein the polypeptide comprises a KH_{—}2 domain having 70 percent or greater sequence identity to the KH_{—}2 domain of SEQ ID NO: 1311, 1313, 1315, 1317, 1319, 1321, 1323, 1324, 1325, 1326, 1327, 1329, 1331, 1333, 1334, 1336, 1338, 1340, 1342, 1343, 1345, 1347, 1349, 1350, 1351, 1353, 1354, 1356, 1358, 1360, or 1361.

11.-20. (canceled)

21. A plant cell comprising an exogenous nucleic acid, said exogenous nucleic acid comprising a regulatory region operably linked to a nucleotide sequence encoding a polypeptide, wherein the HMM bit score of the amino acid sequence of said polypeptide is greater than about 20, said HMM based on the amino acid sequences depicted in one of FIGS. 1-16, and wherein said plant has a difference in drought tolerance or heat tolerance as compared to a control plant that does not comprise said nucleic acid.

22. A plant cell comprising an exogenous nucleic acid said exogenous nucleic acid comprising a regulatory region operably linked to a nucleotide sequence encoding a polypeptide having 80 percent or greater sequence identity to an amino acid sequence selected from the group consisting of SEQ ID NO: 2, 3, 4, 5, 6, 7, 8, 9, 10, 11, 13, 15, 17, 19, 21, 23, 25, 27, 29, 31, 33, 35, 37, 39, 41, 43, 45, 47, 49, 51, 53, 55, 57, 60, 62, 63, 64, 65, 66, 67, 68, 69, 70, 71, 73, 74, 76, 78, 80, 82, 84, 86, 88, 90, 92, 94, 96, 98, 100, 102, 104, 106, 108, 110, 112, 114, 116, 118, 120, 122, 124, 126, 127, 130, 132, 134, 136, 138, 139, 142, 144, 146, 148, 150, 152, 154, 156, 158, 160, 162, 164, 166, 168, 170, 172, 174, 176, 178, 179, 180, 182, 184, 186, 188, 190, 192, 194, 196, 198, 200, 202, 204, 206, 208, 209, 212, 214, 216, 218, 220, 222, 224, 225, 228, 229, 231, 233, 234, 235, 237, 239, 240, 242, 244, 246, 248, 250, 252, 253, 254, 256, 258, 260, 262, 264, 266, 268, 269, 271, 273, 275, 277, 279, 280, 282, 284, 286, 288, 289, 290, 291, 292, 293, 294, 295, 296, 297, 298, 299, 300, 301, 302, 303, 304, 305, 307, 309, 311, 312, 314, 315, 316, 317, 319, 320, 321, 322, 323, 325, 326, 327, 329, 330, 332, 334, 335, 336, 337, 338, 339, 340, 341, 343, 344, 346, 348, 349, 350, 351, 353, 355, 356, 358, 360, 362, 364, 366, 368, 369, 370, 371, 373, 375, 377, 379, 381, 383, 385, 387, 389, 390, 392, 394, 396, 398, 400, 401, 402, 404, 405, 407, 408, 410, 412, 413, 414, 416, 418, 419, 420, 421, 422, 423, 424, 426, 428, 430, 431, 432, 433, 434, 435, 436, 438, 440, 442, 443, 445, 447, 449, 451, 453, 455, 457, 459, 461, 463, 465, 467, 469, 470, 472, 474, 476, 478, 480, 481, 483, 485, 487, 489, 490, 491, 492, 494, 496, 498, 500, 502, 504, 506, 508, 510, 512, 514, 515, 516, 518, 519, 520, 522, 524, 526, 528, 530, 531, 533, 535, 536, 538, 540, 541, 543, 545, 547, 548, 550, 552, 553, 555, 557, 558, 559, 561, 562, 564, 566, 568, 569, 570, 572, 574, 576, 578, 580, 582, 584, 586, 588, 590, 591, 592, 593, 594, 595, 596, 597, 598, 599, 600, 602, 603, 604, 605, 607, 608, 610, 612, 614, 615, 616, 617, 618, 619, 620, 621, 623, 625, 627, 629, 631, 632, 634, 635, 636, 638, 640, 642, 644, 646, 647, 648, 650, 651, 653, 654, 655, 656, 658, 660, 661, 662, 663, 664, 665, 666, 667, 668, 669, 671, 673, 674, 675, 676, 678, 680, 682, 684, 685, 687, 688, 690, 691, 692, 694, 696, 698, 700, 702, 705, 706, 707, 708, 709, 711, 712, 714, 715, 717, 719, 721, 723, 725, 726, 727, 729, 731, 733, 734, 735, 737, 738, 740, 741, 742, 743, 744, 745, 746, 747, 748, 749, 751, 752, 753, 754, 755, 756, 757, 759, 760, 761, 763, 765, 767, 768, 769, 771, 773, 774, 775, 777, 779, 781, 783, 785, 787, 789, 791, 793, 795, 796, 797, 798, 799, 801, 803, 805, 807, 808, 809, 810, 811, 812, 813, 815, 816, 817, 819, 821, 823, 825, 827, 829, 832, 834, 836, 839, 840, 841, 842, 843, 844, 845, 846, 848, 849, 850, 851, 852, 853, 854, 856, 857, 859, 861, 863, 865, 867, 869, 870, 871, 872, 873, 874, 876, 878, 880, 882, 885, 886, 887, 888, 889, 890, 891, 892, 893, 894, 896, 897, 898, 900, 901, 902, 904, 906, 908, 910, 912, 913, 914, 915, 916, 918, 920, 922, 924, 926, 929, 931, 932, 933, 935, 937, 939, 941, 943, 944, 945, 947, 949, 951, 952, 953, 955, 957, 958, 959, 960, 961, 962, 963, 964, 966, 968, 969, 970, 971, 973, 974, 975, 977, 978, 979, 980, 981, 983, 985, 987, 988, 989, 990, 991, 992, 993, 995, 997, 998, 999, 1000, 1001, 1003, 1005, 1007, 1010, 1012, 1013, 1014, 1015, 1016, 1018, 1020, 1022, 1023, 1025, 1027, 1028, 1030, 1031, 1033, 1035, 1037, 1039, 1041, 1043, 1045, 1046, 1048, 1050, 1051, 1053, 1055, 1056, 1058, 1059, 1061, 1062, 1064, 1066, 1068, 1069, 1071, 1073, 1075, 1077, 1079, 1080, 1082, 1084, 1086, 1088, 1090, 1092, 1093, 1094, 1096, 1098, 1100, 1102, 1104, 1106, 1108, 1110, 1112, 1113, 1114, 1116, 1117, 1118, 1119, 1121, 1123, 1125, 1129, 1130, 1131, 1132, 1133, 1134, 1135, 1136, 1137, 1138, 1140, 1142, 1144, 1146, 1148, 1150, 1151, 1152, 1153, 1154, 1156, 1157, 1158, 1159, 1160, 1161, 1162, 1164, 1166, 1168, 1170, 1172, 1174, 1175, 1177, 1179, 1181, 1182, 1184, 1186, 1188, 1189, 1191, 1193, 1195, 1197, 1199, 1201, 1203, 1205, 1207, 1209, 1210, 1212, 1214, 1215, 1216, 1218, 1219, 1221, 1222, 1223, 1225, 1226, 1228, 1230, 1231, 1232, 1234, 1236, 1238, 1240, 1242, 1244, 1246, 1248, 1250, 1252, 1254, 1256, 1258, 1262, 1264, 1265, 1267, 1269, 1271, 1273, 1274, 1276, 1277, 1279, 1281, 1283, 1285, 1286, 1287, 1288, 1290, 1292, 1293, 1294, 1296, 1298, 1300, 1302, 1304, 1306, 1311, 1313, 1315, 1317, 1319, 1321, 1323, 1324, 1325, 1326, 1327, 1329, 1331, 1333, 1334, 1336, 1338, 1340, 1342, 1343, 1345, 1347, 1349, 1350, 1351, 1353, 1354, 1356, 1358, 1360, and 1361 wherein a plant produced from said plant cell has a difference in heat tolerance or drought tolerance as compared to a control plant that does not comprise said nucleic acid.

23. A transgenic plant comprising the plant cell of claim 21, wherein said polypeptide is selected from the group consisting of SEQ ID NO:442, SEQ ID NO:489, SEQ ID NO:568, SEQ ID NO:590, SEQ ID NO:705, SEQ ID NO:711, SEQ ID NO:742, SEQ ID NO:1012, SEQ ID NO:1129, SEQ ID NO:60, SEQ ID NO:364, SEQ ID NO:311, SEQ ID NO:160, SEQ ID NO:2, SEQ ID NO:749, SEQ ID NO:1311, and SEQ ID NO:57.

24. A plant cell comprising an exogenous nucleic acid said exogenous nucleic acid comprising a regulatory region operably linked to a nucleotide sequence having 80 percent or greater sequence identity to a nucleotide sequence selected from the group consisting of SEQ ID NO: 1, 12, 14, 16, 18, 20, 22, 24, 26, 28, 30, 32, 34, 36, 38, 40, 42, 44, 46, 48, 50, 52, 54, 56, 58, 59, 61, 72, 75, 77, 79, 81, 83, 85, 87, 89, 91, 93, 95, 97, 99, 101, 103, 105, 107, 109, 111, 113, 115, 117, 119, 121, 123, 125, 128, 129, 131, 133, 135, 137, 140, 141, 143, 145, 147, 149, 151, 153, 155, 157, 159, 161, 163, 165, 167, 169, 171, 173, 175, 177, 181, 183, 185, 187, 189, 191, 193, 195, 197, 199, 201, 203, 205, 207, 210, 211, 213, 215, 217, 219, 221, 223, 226, 227, 230, 232, 236, 238, 241, 243, 245, 247, 249, 251, 255, 257, 259, 261, 263, 265, 267, 270, 272, 274, 276, 278, 281, 283, 285, 287, 306, 308, 310, 313, 318, 324, 328, 331, 333, 342, 345, 347, 352, 354, 357, 359, 361, 363, 365, 367, 372, 374, 376, 378, 380, 382, 384, 386, 388, 391, 393, 395, 397, 399, 403, 406, 409, 411, 415, 417, 425, 427, 429, 437, 439, 441, 444, 446, 448, 450, 452, 454, 456, 458, 460, 462, 464, 466, 468, 471, 473, 475, 477, 479, 482, 484, 486, 488, 493, 495, 497, 499, 501, 503, 505, 507, 509, 511, 513, 517, 521, 523, 525, 527, 529, 532, 534, 537, 539, 542, 544, 546, 549, 551, 554, 556, 560, 563, 565, 567, 571, 573, 575, 577, 579, 581, 583, 585, 587, 589, 601, 606, 609, 611, 613, 622, 624, 626, 628, 630, 633, 637, 639, 641, 643, 645, 649, 652, 657, 659, 670, 672, 677, 679, 681, 683, 686, 689, 693, 695, 697, 699, 701, 703, 704, 710, 713, 716, 718, 720, 722, 724, 728, 730, 732, 736, 739, 750, 758, 762, 764, 766, 770, 772, 776, 778, 780, 782, 784, 786, 788, 790, 792, 794, 800, 802, 804, 806, 814, 818, 820, 822, 824, 826, 828, 830, 831, 833, 835, 837, 838, 847, 855, 858, 860, 862, 864, 866, 868, 875, 877, 879, 881, 883, 884, 895, 899, 903, 905, 907, 909, 911, 917, 919, 921, 923, 925, 927, 928, 930, 934, 936, 938, 940, 942, 946, 948, 950, 954, 956, 965, 967, 972, 976, 982, 984, 986, 994, 996, 1002, 1004, 1006, 1008, 1009, 1011, 1017, 1019, 1021, 1024, 1026, 1029, 1032, 1034, 1036, 1038, 1040, 1042, 1044, 1047, 1049, 1052, 1054, 1057, 1060, 1063, 1065, 1067, 1070, 1072, 1074, 1076, 1078, 1081, 1083, 1085, 1087, 1089, 1091, 1095, 1097, 1099, 1101, 1103, 1105, 1107, 1109, 1111, 1115, 1120, 1122, 1124, 1126, 1127, 1128, 1139, 1141, 1143, 1145, 1147, 1149, 1155, 1163, 1165, 1167, 1169, 1171, 1173, 1176, 1178, 1180, 1183, 1185, 1187, 1190, 1192, 1194, 1196, 1198, 1200, 1202, 1204, 1206, 1208, 1211, 1213, 1217, 1220, 1224, 1227, 1229, 1233, 1235, 1237, 1239, 1241, 1243, 1245, 1247, 1249, 1251, 1253, 1255, 1257, 1259, 1260, 1261, 1263, 1266, 1268, 1270, 1272, 1275, 1278, 1280, 1282, 1284, 1289, 1291, 1295, 1297, 1299, 1301, 1303, 1305, 1312, 1314, 1316, 1318, 1320, 1322, 1328, 1330, 1332, 1335, 1337, 1339, 1341, 1344, 1346, 1348, 1352, 1355, 1357, 1359, and 1362, or a fragment thereof, wherein a plant produced from said plant cell has a difference in drought tolerance or heat tolerance as compared to a control plant that does not comprise said nucleic acid.

25. A transgenic plant comprising the plant cell of claim 24.

26. The transgenic plant of claim 25, wherein said plant is a member of a species selected from the group consisting of Panicum virgatum (switchgrass), Sorghum bicolor (sorghum, sudangrass), Miscanthus giganteus (miscanthus), Saccharum sp. (energycane), Populus balsamifera (poplar), Zea mays (corn), Glycine max (soybean), Brassica napus (canola), Triticum aestivum (wheat), Gossypium hirsutum (cotton), Oryza sativa (rice), Helianthus annuus (sunflower), Medicago sativa (alfalfa), Beta vulgaris (sugarbeet), and Pennisetum glaucum (pearl millet).

27.-33. (canceled)

34. A transgenic plant comprising the plant cell of claim 21.

35. A transgenic plant comprising the plant cell of claim 22.

36. The transgenic plant of claim 34, wherein said plant is a member of a species selected from the group consisting of Panicum virgatum (switchgrass), Sorghum bicolor (sorghum, sudangrass), Miscanthus giganteus (miscanthus), Saccharum sp. (energycane), Populus balsamifera (poplar), Zea mays (corn), Glycine max (soybean), Brassica napus (canola), Triticum aestivum (wheat), Gossypium hirsutum (cotton), Oryza sativa (rice), Helianthus annuus (sunflower), Medicago sativa (alfalfa), Beta vulgaris (sugarbeet), and Pennisetum glaucum (pearl millet).

37. The transgenic plant of claim 34, wherein said plant is a member of a species selected from the group consisting of Panicum virgatum (switchgrass), Sorghum bicolor (sorghum, sudangrass), Miscanthus giganteus (miscanthus), Saccharum sp. (energycane), Populus balsamifera (poplar), Zea mays (corn), Glycine max (soybean), Brassica napus (canola), Triticum aestivum (wheat), Gossypium hirsutum (cotton), Oryza sativa (rice), Helianthus annuus (sunflower), Medicago sativa (alfalfa), Beta vulgaris (sugarbeet), and Pennisetum glaucum (pearl millet).

The application's sequence listing, which the Patent Office published only in electronic form, follows.

SEQUENCE LISTING (1362 sequences)

SEQ ID NO: 1 - DNA, 947 bp, Arabidopsis thaliana
  misc_feature: Ceres CLONE ID no.14572
  misc_feature: Encodes the peptide sequence at SEQ ID NO. 2
aaaaaaggaaagacgcaatcttttcttgtctcttccattgcttcaaatcctcctaataaagctttcctctttcactttctaatctctttaatccgtttaaatccaatcccaaatacagattttgattacaaaaatctaacattttgctgatttgtgttttagggttctctcgtgttttttatgattttgattcccgtaaagattcaatcacttttctcatatctcttgttactgaatttgatccaatcgatcgataaaccaaacccagaagctatgagagtgcacccaattcccagaaacatcaacaacacattgatccatcatcatcatcataacccgacccgagaacccggaaagaatctccgacgattaccacatatcttcaaccgtgttctggagctaccattgaggtcagaagcagatgtagcagtggaagagagacacgactgttttcgatttgtggcggagacggtaggtctctgtaacggcgatggagaaatgagggcttatatggttgagattcatcctggtataaccaagatcgttgtgaggacaaatgggtcttcttctcttggtttgtctttagacgaattagagcttgacgtgtggcgttttaggttaccggaatcaactaggcctgagcttgttactgttgctagtgttgatggtgatttgattgttactgtgcctaagaatgctgaagaagaagatgatgatggtggtggtggtgattttggacaaggtattggtagtggaaggcttgtgcttgttcagtgaatcaaagtaatgtcctctatgtaacatgagaagaagactaatctctaatcttcttcgtttcgttgatattgtgtagccttctgtttttgttgttggcaataaaagaaaagattgaatctttgatgttctcttattttgtaagatcaacaagggttgtttaaggttgtacc

SEQ ID NO: 2 - protein, 198 aa, Arabidopsis thaliana
  misc_feature: Ceres CLONE ID no.14572
  misc_feature: Bit score of 387.9 for HMM based on sequences of FIGURE 14.
MILIPVKIQSLFSYLLLLNLIQSIDKPNPEAMRVHPIPRNINNTLIHHHHHNPTREPGKNLRRLPHIFNRVLELPLRSEADVAVEERHDCFRFVAETVGLCNGDGEMRAYMVEIHPGITKIVVRTNGSSSLGLSLDELELDVWRFRLPESTRPELVTVASVDGDLIVTVPKNAEEEDDDGGGGDFGQGIGSGRLVLVQ

SEQ ID NO: 3 - protein, 198 aa, Arabidopsis thaliana
  misc_feature: Public GI ID no.18403425
  misc_feature: Bit score of 389.8 for HMM based on sequences of FIGURE 14.
  misc_feature: Functional Homolog Of Ceres CLONE ID no. 14572 at SEQ ID NO. 2
MILIPVKIQSLFSYLLLLNLIQSIDKPNPEAMRVHPIPRNINNTLIHHHHHNPTREPGKNLRRLPHIFNRVLELPLRSEADVAVEERHDCFRFVAETVGLCNGDGEMRAYMVEIHPGITKIVVRTNGSSSLGLSLDELELDVWRFRLPESTRPELVTVACVDGDLIVTVPKNAEEEDDDGGGGDFGQGIGSGRLVLVQ

SEQ ID NO: 4 - protein, 167 aa, Arabidopsis thaliana
  misc_feature: Public GI ID no.11994285
  misc_feature: Bit score of 389.8 for HMM based on sequences of FIGURE 14.
  misc_feature: Functional Homolog Of Ceres CLONE ID no. 14572 at SEQ ID NO. 2
MRVHPIPRNINNTLIHHHHHNPTREPGKNLRRLPHIFNRVLELPLRSEADVAVEERHDCFRFVAETVGLCNGDGEMRAYMVEIHPGITKIVVRTNGSSSLGLSLDELELDVWRFRLPESTRPELVTVACVDGDLIVTVPKNAEEEDDDGGGGDFGQGIGSGRLVLVQ

SEQ ID NO: 5 - protein, 171 aa, Oryza sativa subsp. japonica
  misc_feature: Public GI ID no.115470807
  misc_feature: Bit score of 370.0 for HMM based on sequences of FIGURE 14.
  misc_feature: Functional Homolog Of Ceres CLONE ID no. 14572 at SEQ ID NO. 2
MRVHPAPRKRTIAVQRRCGVAAAAAGMAGGKKLRRLPHIFAKVLELPFAADADVSVEEDAAALRFVAAADGFTPSGGASAHAVEIHPGVTKVVVRDLSAGLDGDDGAVFELDRWRFRLPPCTLPAMATATYADGELVVTVPKGAAPDDDGDGAAAAVLGGSGVVESVLLLV

SEQ ID NO: 6 - protein, 162 aa, Oryza sativa subsp. japonica
  misc_feature: Public GI ID no.108706298
  misc_feature: Bit score of 298.4 for HMM based on sequences of FIGURE 14.
  misc_feature: Functional Homolog Of Ceres CLONE ID no. 14572 at SEQ ID NO. 2
MRIHPSPATTAGGSCGGKKDLRRLPHVYSKVLELPFPADTDVAVFEGPDAFHFVVSAAAALAGEVRVRTVRIHPGVVRVVVQAGGGGVHDDGDDDDMELDKWRSRLPEASCPAMAVAGYVNGQLVVTVPKGRGGGEGDNDGGEEAWRCCNGGKISGRLVVVQ

SEQ ID NO: 7 - protein, 152 aa, Arabidopsis thaliana
  misc_feature: Public GI ID no.15233585
  misc_feature: Bit score of 291.5 for HMM based on sequences of FIGURE 14.
  misc_feature: Functional Homolog Of Ceres CLONE ID no. 14572 at SEQ ID NO. 2
MKIHPLPRNENNNNLIHHARDPTREPGKKLRRLPHIFSRVLELPLKSDADVAVEESHDCFRFVAETDGGGGGGVRAYMVEIHPGVTKILVRTNGSSSLGLSLDELELDVWRFRLPESTRPELVTVDCDGDGELIVTVPKIEDNGRDLIVLVQ

SEQ ID NO: 8 - protein, 145 aa, Oryza sativa subsp. japonica
  misc_feature: Public GI ID no.125599279
  misc_feature: Bit score of 289.0 for HMM based on sequences of FIGURE 14.
  misc_feature: Functional Homolog Of Ceres CLONE ID no. 14572 at SEQ ID NO. 2
MAGGKKLRRLPHIFAKVLELPFAADADVSVEEDAAALRFVAAADGFTPSGGASAHAVEIHPGVTKVVVRDLSAGLDGDDGAVFELDRWRFRLPPCTLPAMATATYADGELVVTVPKGAAPDDDGDGAAAAVLGGSGVVESVLLLV

SEQ ID NO: 9 - protein, 160 aa, Oryza sativa subsp. japonica
  misc_feature: Public GI ID no.115450865
  misc_feature: Bit score of 237.7 for HMM based on sequences of FIGURE 14.
  misc_feature: Functional Homolog Of Ceres CLONE ID no. 14572 at SEQ ID NO. 2
MRIHPSPATTAGGSCGGKKDLRRLPHVYSKVLELPFPADTDVAVFEGPDAFHFVVSAAAALAGEVRVRTVRIHPGVVRVVVQAGGGGVHDDGDDDDMELDKWRSRLPEASCPAMAVAGYVNGQLVVTVPKGRGGGEVQGRAVSYAVFQTAFLEAKGRKLL

SEQ ID NO: 10 - protein, 176 aa, Oryza sativa subsp. japonica
  misc_feature: Public GI ID no.22773244
  misc_feature: Bit score of 242.8 for HMM based on sequences of FIGURE 14.
  misc_feature: Functional Homolog Of Ceres CLONE ID no. 14572 at SEQ ID NO. 2
MRIHPSPATTAGGSCGGKKDLRRLPHVYSKVLELPFPADTDVAVFEGPDAFHFVVSAAAALAGEVRVRTVRIHPGVVRVVVQAGGGGVHDDGDDDDMELDKWRSRLPEASCPAMAVAGYVNGQLVVTVPKGRGGGEVQGRAVSYAVFQTAFLEAKGRKLLNTENVFPTSADIEGID

SEQ ID NO: 11 - protein, 230 aa, Medicago truncatula
  misc_feature: Public GI ID no.92874749
  misc_feature: Bit score of 220.1 for HMM based on sequences of FIGURE 14.
  misc_feature: Functional Homolog Of Ceres CLONE ID no. 14572 at SEQ ID NO. 2
MDSFEAMRCNRKWNISIAYNMMNPLSQAETLLSMSGFSNNNNKLRRLPHVFSRILQLPLRSDADVSIEEEPTCFRFVAETDSSLGHVETHTLHIHPGVTKIVVRASHSLHFSLDDLHPDIWRFRLPESVVPELATAVFVDGELIVTVPKAFDDENTPEPIGGGGATLIYLARIKPLIGHWIMRGLMIIAFDRQLNTHVLTQNLPCFRVGYDTCRIEIGLLNLRTPLWLRY

SEQ ID NO: 12 - DNA, 1154 bp, Gossypium hirsutum
  misc_feature: Ceres CLONE ID no.1857034
  misc_feature: Encodes the peptide sequence at SEQ ID NO 13
tttgtttcatattcttggggaaaaaaaaccaaatcacaaaatctaattgcccctttcagcactcaatctccaagaacaattttttttttagaatcattttcttccattttagtttttatgtaagcctttttatgggtttttatcaagatcttcccaaaaaagcaagagaaaaaaaataaaaatttgaagaattgacaccattgctttttatgattctaccttttccactcaaaaacttgatcagggttttgattcctttccaaatctcttcacttttcttcaagaaagcatctttgttgttgttgctattaataatcttgttcctcgccttcttctcctttgatttcagttcttcaaatctttgtaaaaaaaaccagaaggaacccaaatatttaataccctcaaagagcaccatgaggatccatccgttgccgaagaaaagaaacatcaccgtccaatacgagatgaacccaaggaccacaaggtctcaagctgagaccttgttgaccggcgggtccaacaagaagctccggaggttaccccacatcttcagccgcgtcctcgagctgccttttaggtcggatgcagacgtggcggtggaggaaagccctgactgtttcaagttcgtggcggagacggatgggatgatcggcgatgtcgtgagggctcatacagttgaaatccatcctggggttactaagattgtgattaggtcgaacagtttggtggattttggtttgctggatgatttggagcttgatatgtggcggttcaggctgccggagacgacacggccggagctggcgagtgctgtttacgaggatggggagctaattgtgacggtgcccaagggaggtgaagtggagaatttggaggacggtggtggtggtgacgagttgagaggaggcatgggaaatggtaataacaacaataataacaataataggcttgttcttgtacagtaagtaataaatatggaacctttagctctgtttccttaattgcatgttattttcattttagttcttgaaggtcactggtggagcttagccctttttcttttttttctttttttgtatggttactaccttttattacttaatcaaatcaagaattgttcttctctgaatgacgaaaaaaaaaaaaaaaaaaaa

SEQ ID NO: 13 - protein, 251 aa, Gossypium hirsutum
  misc_feature: Ceres CLONE ID no.1857034
  misc_feature: Bit score of 450.8 for HMM based on sequences of FIGURE 14.
  misc_feature: Functional Homolog Of Ceres CLONE ID no. 14572 at SEQ ID NO. 2
MILPFPLKNLIRVLIPFQISSLFFKKASLLLLLLIILFLAFFSFDFSSSNLCKKNQKEPKYLIPSKSTMRIHPLPKKRNITVQYEMNPRTTRSQAETLLTGGSNKKLRRLPHIFSRVLELPFRSDADVAVEESPDCFKFVAETDGMIGDVVRAHTVEIHPGVTKIVIRSNSLVDFGLLDDLELDMWRFRLPETTRPELASAVYEDGELIVTVPKGGEVENLEDGGGGDELRGGMGNGNNNNNNNNRLVLVQ

SEQ ID NO: 14 - DNA, 1210 bp, Gossypium hirsutum
  misc_feature: Ceres CLONE ID no.1842931
  misc_feature: Encodes the peptide sequence at SEQ ID NO 15
attggctcttagttttcctgcacttgaataaaaggccagatttctgtgtttctcatacaattttgtttcatattcttggaaaaaaaaaccaaatcacaaaatctaattgcctctttcagccctcaatctacaagaacaattttttttaaaaatttttagaatccttttcttccattttagtttttatgtaaccctttttatgggtttttatcaagatcttcccaaaaaagcaagagaaaaaaaataaaaatttgaagaattgacaccattgctttttatgattctaccttttccactcacaaacttgatcagggttttgattcctttccaaatctcttcacttttcttcaagaaagcatcttagttgttgttgctattaataatcttgttcctagccttcttctcctttgatttaagttcttcaaatctttgtaaaaaaaaccggaaggaacccaaatatttaataccctcaaagagcaccatgaggatccatccgttgccgaagaaaaggaacatcaccatccaatacgagatgaacccaaggaccacaaggtctcaagctgagaccttgttgatcggcgggtccaacaagaagctccggaggttaccccacatcttcagccgcgtcctcgagctgccttttaggtcggatgcagacgtggcggtggaggaaagccctgactgtttcaagttcgtggcggagacggatgggaggatcggcgatgtcgtgagggctcatacggttgaaatccatcctggggttactaagattgtgattaggtcgaacagtttggtggattttggtttgctggatgatttggagcttgatatgtggcggttcaggctgccggagacgacacggccggagctggcgagtgctgtttacgaggatggggagctaattgtgacggtgcccaagggaggtgaagtggagaatttggaggacggtggtggtggtgacgagttgagaggaggcatgggaaatggtaataacaacaataataacaataataggcttgttcttgtacagtaagtaataaatatggaacctttagctctgtttccttaattgcatgttattttcattttagttcttgaaggtcactggtggagcttagcccttctttttttttttttttgtatggttactaccttttattacttaatcaaatcaagaattgttcttctctaaaaaaaaaaaaaaaaaaaa

SEQ ID NO: 15 - protein, 183 aa, Gossypium hirsutum
  misc_feature: Ceres CLONE ID no.1842931
  misc_feature: Bit score of 450.8 for HMM based on sequences of FIGURE 14.
  misc_feature: Functional Homolog Of Ceres CLONE ID no. 14572 at SEQ ID NO. 2
MRIHPLPKKRNITIQYEMNPRTTRSQAETLLIGGSNKKLRRLPHIFSRVLELPFRSDADVAVEESPDCFKFVAETDGRIGDVVRAHTVEIHPGVTKIVIRSNSLVDFGLLDDLELDMWRFRLPETTRPELASAVYEDGELIVTVPKGGEVENLEDGGGGDELRGGMGNGNNNNNNNNRLVLVQ

SEQ ID NO: 16 - DNA, 713 bp, Zea mays
  misc_feature: Ceres CLONE ID no.321308
  misc_feature: Encodes the peptide sequence at SEQ ID NO 17
aagagaggagccttcgcttttggacttgcaccgtcgtgatctgtcccgcgaccacatgaggatccacccagcatcccccaccgccggcggcaagaaggacctccggcgcctgccgcacgtgtacagcaaggtgctggagctgccgctcccggcggacaccgacgtccaggtgttcgaaggcccagacgccttccacttcgtcgcggcgccggccgccggtgcgcgtgccgccgccaccgtgcgtgtgcgcaccgtcaggatccaccccggggtcaccaaggtcgtggtgcaggccggagccgccgaacgggccgctgacgacgacgccgccagcgacagcatggagctcgacaggtggcggtcccggctgcccgagccgacctgtccggccatggcggtggccgggtacgtcgacggccagctcgtcgtcacggtgcccaagggccccggtgccgaggaaggcgccgacgcagggcaaggcgaggttacctggaggtgcggcggcggaggcaagatcactggaagactcgtggttgtacagtaggagcgtctaatctatgtactactactccatagtaatgtcttgccatctttctttctttttttggtaaattaagatgggctagctgttcatcatgttgccttccccttcccygcttcgcatcagagacagtcagacaggcgatgtttcatgagctatgttctcttcctcc

SEQ ID NO: 17 - protein, 162 aa, Zea mays
  misc_feature: Ceres CLONE ID no.321308
  misc_feature: Bit score of 346.4 for HMM based on sequences of FIGURE 14.
  misc_feature: Functional Homolog Of Ceres CLONE ID no. 14572 at SEQ ID NO. 2
MRIHPASPTAGGKKDLRRLPHVYSKVLELPLPADTDVQVFEGPDAFHFVAAPAAGARAAATVRVRTVRIHPGVTKVVVQAGAAERAADDDAASDSMELDRWRSRLPEPTCPAMAVAGYVDGQLVVTVPKGPGAEEGADAGQGEVTWRCGGGGKITGRLVVVQ

SEQ ID NO: 18 - DNA, 901 bp, Musa acuminata
  misc_feature: Ceres CLONE ID no.1725811
  misc_feature: Encodes the peptide sequence at SEQ ID NO 19
atcgctcctctcaattcgaatcgatattggcttcaagatttctcattgagcccttcttccgtagatttttctgtttaatcgaacgaatcgttggcttttttctgaattcccctctcaattttcatcaaaagtagtgtttttccgccaaatttaggcaggtttttcatttcgatcgaggtttcgttgaagaatttaatctcggatcggtgtttgttgcggtttattggcctaaattttagggtagacaagggttttgcagaaggagatatgagggttcatccggtccccaagaagcggaacatcaccttccgctgcggcgtcaaccccgcggctgcagccaccgccgtgcacggccgacagaagaagctccgccgtctcccccacatcttcagcaaggtcctggagttaccctttgccgccgacgccgatgtggccgtcgaggaggacgcggacggcttccggttcgtcgcagcgaccgacgtcctctggggcgatgtccaagcccagacggtccagatacaccccggggtgacgaaggtgttcgtcagagacggtagcgacggcgacgacctcgacacggagctcgagctaaaccggtggcggttccggctgccgccgtccacccgcccggcgctcgccactgctgcttacactagcggtgagctcgtggtgaccattccgaagggggcagggcccgaggaggaagatggagaggtacaagaattctttggtggaggagggagtaacggggacttggggggccgagacattagccatctcgtaattgtacagtaaatgtttgatgatttgccttctctggtatcgttcgttgatagaactctcatattagggatctgctatgtaatttatgcaacgcttctattcatttcagtttgtagtt

SEQ ID NO: 19 - protein, 175 aa, Musa acuminata
  misc_feature: Ceres CLONE ID no.1725811
  misc_feature: Bit score of 418.2 for HMM based on sequences of FIGURE 14.
  misc_feature: Functional Homolog Of Ceres CLONE ID no. 14572 at SEQ ID NO. 2
MRVHPVPKKRNITFRCGVNPAAAATAVHGRQKKLRRLPHIFSKVLELPFAADADVAVEEDADGFRFVAATDVLWGDVQAQTVQIHPGVTKVFVRDGSDGDDLDTELELNRWRFRLPPSTRPALATAAYTSGELVVTIPKGAGPEEEDGEVQEFFGGGGSNGDLGGRDISHLVIVQ

SEQ ID NO: 20 - DNA, 1056 bp, Glycine max
  misc_feature: Ceres CLONE ID no.1357455
  misc_feature: Encodes the peptide sequence at SEQ ID NO 21
atcaatcaatttgcagcatcctaatctcgctcagattttctccagaaaagggaaaataaataaaaaaagagaataataataatatcttttgtaattcgcaaaacgtgatcgacgctggcgcaaattgaaattaggaattagggttagggttttcattatcttcgcccggaaaagaaaggggggaagaagaaagaaccgttcctttatgatcgaaaaggtgcctttggtcatcatcgcggtgttaatcttggtggtgcaatcctctgcagcgttccacggtataaacagaatcatgaaggtccaccctgttcctcgaaaacgcaacatctcaatccaatttggcggcgacgggggcaacccgatgtcggaggctcaggcgctgttggggatcgccgggaagaagctccggcgactaccgcacgtgttcagctgcgtgctggagctgcccttccgctccgacgccgacgttgcggtggaggaagcccccgactgcttccgctttgtggcggagaccgatggaatcggcgacgtgagggcgcacacggtggaaatccaccctggcgtgacgaagatcgtggtgagggacggcggctcggtggagctctcgctcgaccagctggagctcgatatgtggaggttccggttgccggaatcgactcggccggagctcgccagcgcggtgttcgtcgacggcgagctcatcgtcacggtgccgaaggggcacgaagaggagaatgatggggatggtgatagaggtatgggtggaggtagacttgtgcttgtacagtagtgatgaatgaatgaatgagtgggtgaggtaatgaatgattcttttgttaacgccttgtggcctttccaaacgtggccttgttagtatgtcggttagatttcaggttgttgttggaactagtttctctgtgaattttattgttgctattgttcagtcaggaacaaaaatgttttatctggattctggagaatggtttattcatcatggcaatggcaattatccaaaataggtgtaactgaggcgtgtttcgattttcatttcttctc

SEQ ID NO: 21 - protein, 165 aa, Glycine max
  misc_feature: Ceres CLONE ID no.1357455
  misc_feature: Bit score of 411.4 for HMM based on sequences of FIGURE 14.
  misc_feature: Functional Homolog Of Ceres CLONE ID no. 14572 at SEQ ID NO. 2
MKVHPVPRKRNISIQFGGDGGNPMSEAQALLGIAGKKLRRLPHVFSCVLELPFRSDADVAVEEAPDCFRFVAETDGIGDVRAHTVEIHPGVTKIVVRDGGSVELSLDQLELDMWRFRLPESTRPELASAVFVDGELIVTVPKGHEEENDGDGDRGMGGGRLVLVQ

SEQ ID NO: 22 - DNA, 910 bp, Brassica napus
  misc_feature: Ceres CLONE ID no.943370
  misc_feature: Encodes the peptide sequence at SEQ ID NO 23
atcttagaggtttccttctctcctcttctccactttctaattaaaatctgtatcattcaatcgcaaagattcgatctttctttcaaagaaataaacaaagattcgattcataaaaaccgaacctttaattcatctcggaggagggtttcgtaatctcttcttttatggttttgattccttggaatcgatcacagtttctattcccgagtctgatcctatcgcttctcatcattctaacaatcgagaaacccgacccggaagccatgagagtccacccaatccccagaaaccttaacaacaacaccttgatccaccaccaccaccatcgtcgtaacccgacccgagaacccggaaagaatctgcgtcgtttaccgcacatcttcagccgcgttcttgagcttccgttaaggtccgaagcagatgttgccgtggaggagaaacacgattgtttcagattcgtggcggaaacggagggtctctgcgacggcggggagatgagggcttacgtggtggatatccatccgggtataaccaagatcgttgtgaggacaaatgggttgtctttggggttgtcgctggacgagttggagctcgacatgtggcgttttaggcttccggagacgaccaggcctgagcttgttactgtggtttgtgttgatggggttttgattgttaccgtccccaagatggttccagaggaggaagatggtggttttggacaaggtatggcaagtgggaggcttgttcttgttcagtaatgctttggaacaaaaatttacagtttggttgtgtaatgatatgattatgatgtcttttaaaagatttgcttttcgtttctttcatatattgttgttagccttacttttttgttggcaatttagttgaaataaataaaaaaagacaggttgag

SEQ ID NO: 23 - protein, 164 aa, Brassica napus
  misc_feature: Ceres CLONE ID no.943370
  misc_feature: Bit score of 372.5 for HMM based on sequences of FIGURE 14.
  misc_feature: Functional Homolog Of Ceres CLONE ID no. 14572 at SEQ ID NO. 2
MRVHPIPRNLNNNTLIHHHHHRRNPTREPGKNLRRLPHIFSRVLELPLRSEADVAVEEKHDCFRFVAETEGLCDGGEMRAYVVDIHPGITKIVVRTNGLSLGLSLDELELDMWRFRLPETTRPELVTVVCVDGVLIVTVPKMVPEEEDGGFGQGMASGRLVLVQ

SEQ ID NO: 24 - DNA, 819 bp, Triticum aestivum
  misc_feature: Ceres CLONE ID no.1327712
  misc_feature: Encodes the peptide sequence at SEQ ID NO 25
atctcgcctcgtcttcctcctaaatcccccaacccacgcacagccacggagctccgcatcgacagcacgtaatttaaagcacctctggcctcttcccagcgcccgatctcctccccgcgcgcgcctaggttagtgtttggagccccctcctcccgtcgtcctcctgccgcagccgcatctgctcgccatgagggtccacccggccccgcggaagcgcaccatcgccgtgcagcgctgcgccgcggccgccctaagcgcagcgggcggcgccaagaagctgcggcgcctctcgcacatcttcgcgaaggtgctcgagctccctttcgccgccgacgccgacgtcgccgtcgaggaggacgcagcggagctccgcttcgtcgccgccacggaaggcttctccccaggcggcgcctgcgcccacgccctcgagatccaccctggcgtcaccaaggtcgtcgtacgggacctgtccaccggcatcggcgccgatgaccgcaccgctaccttcgagctcgatcggtggcggttccgtctcccgccttgcacgcgccccaccatggccacagcaacctacgccgagggcgagctcatcgtcaccgtgcccaagggtgccgttcctgacgagggcgatggcaacgctgacggagccgccatcctaggaggctccggggccgagagggtcctcgtgtttgtacagtaactttatgccgtaacaccacttttgctcacccgcatcgtttttaatatttatgttgcgagataatcatatattcatatggtaacaacagtgcagtaagaataagaaatgatgtatatggt

SEQ ID NO: 25 - protein, 170 aa, Triticum aestivum
  misc_feature: Ceres CLONE ID no.1327712
  misc_feature: Bit score of 383.8 for HMM based on sequences of FIGURE 14.
  misc_feature: Functional Homolog Of Ceres CLONE ID no. 14572 at SEQ ID NO. 2
MRVHPAPRKRTIAVQRCAAAALSAAGGAKKLRRLSHIFAKVLELPFAADADVAVEEDAAELRFVAATEGFSPGGACAHALEIHPGVTKVVVRDLSTGIGADDRTATFELDRWRFRLPPCTRPTMATATYAEGELIVTVPKGAVPDEGDGNADGAAILGGSGAERVLVFVQ

SEQ ID NO: 26 - DNA, 675 bp, Panicum virgatum
  misc_feature: Ceres CLONE ID no.1764692
  misc_feature: Encodes the peptide sequence at SEQ ID NO 27
agcgagagcagaggagacaccacgaaaggaacccgagagagggggaaaaaaacttcggttttggagctcttggcttgttgcgagcacatgaggatccacccagcagcagcagctcccgccggcggcaagaaggacctccgccggcttccgcacgtgtacagcaaggtgctcgagctgctgctcccggcggacaccgacgtcgaggtgttcgaaggccccgacgccttccacttcgtcgccgccggtgcgcgaggcgccggcgtggtgcaggtgcgcaccgtgaggatccaccccggggttaccaaggtagtggtgcaggcaggtggcgccggaggcgctgaggaggctggcgccgacgacatggagctcgacaggtggcggtcccggctgcccgaggcgagtcgtccggcgatggcggtggctgggtacgtcgacgggcagctcgttgtgacagttccaaaggggcgtgaaggcagcgaaggcgccgatgccgggcaaggtgaggttacctggagatactgcagcggaggaaagattagtggaagactggtggttgtacagtagtagtagagaatatatagtgcgttggtcgtcatctaatcaaaatctagtactatgtagtaatgtcttgccatctttgtttttttttcctgaagatgggctgtttattatgtt

SEQ ID NO: 27 - protein, 158 aa, Panicum virgatum
  misc_feature: Ceres CLONE ID no.1764692
  misc_feature: Bit score of 342.6 for HMM based on sequences of FIGURE 14.
  misc_feature: Functional Homolog Of Ceres CLONE ID no. 14572 at SEQ ID NO. 2
MRIHPAAAAPAGGKKDLRRLPHVYSKVLELLLPADTDVEVFEGPDAFHFVAAGARGAGVVQVRTVRIHPGVTKVVVQAGGAGGAEEAGADDMELDRWRSRLPEASRPAMAVAGYVDGQLVVTVPKGREGSEGADAGQGEVTWRYCSGGKISGRLVVVQ

SEQ ID NO: 28 - DNA, 666 bp, Glycine max
  misc_feature: Ceres CLONE ID no.1059300
  misc_feature: Encodes the peptide sequence at SEQ ID NO 29
aatctttttgttcttttatggttttggaatcgatctgtaatctcattctgactttgatccaatcgcttcttatctagaaacccgacccgaaaagccatgagagtccatccaattcttaacaacaacacattgatccaccaccaccaccatcatcaccataacccgacccgagaacccggaaagaatctccgtcgcttacctcacatcttcaaccgcgttctcgagcttccgctaaggtccgaagcagacgtctccgtggaagagaaacccgattgcttcagattcgtggcggagacggacggtcttcgcggcggcggaggggagatgacggcgtatatggtggagatccatccgggtattaccaagatcgtcgttaggacaaatgggttgtctttgggtttgtcgttggatgagttggagcttgatgtctggcgttttaggcttccggagacgacgaggcctgagcttgttaccgtggcttgtgttgatggggctttggttgttacggttcctaagatggtttcagaggaagatgatgatggttttggacaaggtgtgggaactgggaggctagttcttgttttgtaaaatcgagccatgtctctgctttggattaagacagcttatgtaattatatctatgaacgttttcatttgaatctttgtg

SEQ ID NO: 29 - protein, 163 aa, Glycine max
  misc_feature: Ceres CLONE ID no.1059300
  misc_feature: Bit score of 336.9 for HMM based on sequences of FIGURE 14.
  misc_feature: Functional Homolog Of Ceres CLONE ID no. 14572 at SEQ ID NO. 2
MRVHPILNNNTLIHHHHHHHHNPTREPGKNLRRLPHIFNRVLELPLRSEADVSVEEKPDCFRFVAETDGLRGGGGEMTAYMVEIHPGITKIVVRTNGLSLGLSLDELELDVWRFRLPETTRPELVTVACVDGALVVTVPKMVSEEDDDGFGQGVGTGRLVLVL

SEQ ID NO: 30 - DNA, 880 bp, Panicum virgatum
  misc_feature: Ceres CLONE ID no.1804869
  misc_feature: Encodes the peptide sequence at SEQ ID NO 31
gtgacacctcctcagcctttggcctcttgataccctataaatcccatcgtccctccgctgttcacctgtccaaataggcaaataccagcgagagcagaggagacaccacgaaaggaacccgagagaaggggtcttggcttgttgcgagcacatgaggatccacccagcagcagctcccgccggcggcaagaaggacctccgccggctgccgcacatgtacagcaaggtgctcgagctgccgctcccggcggacactgacgtcgaggtgttcgaaggccccgatgccctccacttcgttgccaccggtgcccgtggcgccggcgtggtgcaggtgcgcaccgtgaggatccaccccggggttaccaaggtagtggtgcaggcaggaggcaccggcggcggtgagaaggctggcgccgatgacatggagcttgacaggtggcggtcccggttgcccgaggcgagtcatcctgagatggcggtggccgggtacgtcgacgggaagctcgttgtgacggtgccaaagggccgtgatggcggtgaaagcgctgatgccagccaaggtgaggttacctgcagaagctgcagtggaggaaagatcagtggaagactggtggttgtacagtagtagtagagactatatagtgcggtggttgttcatctaatccactatctagtaatgtcttgccatctttgttttttttcctgaagatgggctgtttattatgttacttcccttgcctggttttagaatcagatgtttcacaagctgccttcccgctggttcttaagcgtatagaaacagctattgtaatttatcttagatttccttgaaaagttgaaaacaaatgtaaattctagacaaaaaaaaaaaaaaaaaaaa

SEQ ID NO: 31 - protein, 157 aa, Panicum virgatum
  misc_feature: Ceres CLONE ID no.1804869
  misc_feature: Bit score of 313.9 for HMM based on sequences of FIGURE 14.
  misc_feature: Functional Homolog Of Ceres CLONE ID no. 14572 at SEQ ID NO. 2
MRIHPAAAPAGGKKDLRRLPHMYSKVLELPLPADTDVEVFEGPDALHFVATGARGAGVVQVRTVRIHPGVTKVVVQAGGTGGGEKAGADDMELDRWRSRLPEASHPEMAVAGYVDGKLVVTVPKGRDGGESADASQGEVTCRSCSGGKISGRLVVVQ

SEQ ID NO: 32 - DNA, 840 bp, Zea mays
  misc_feature: Ceres CLONE ID no.378863
  misc_feature: Encodes the peptide sequence at SEQ ID NO 33
gccccaattccccaacacagcgcaagggccagacgcccagaaccagacgagcacggacggacctccgcaggccgcatccctccacgtgcacgagttccgaggcgccccttcgatccgcccggcccggccctctccaccgcgcgcgcgcgtccgtcgctagcgtttggccgtctccctcttgagccccgagtacccccacgacgcggcaaggaacctcgccatgagggtccacccggctccgcggaagcgcaccatcgccgtgcagcgctgcgccacggcggcggcggcggcggcggcgggcgcactcggcgggaagaagctgcgccgcctgccgcacatcttcgccaaggtgctggagctccccttcgcggccgacgcggacgtgtccgtcgaggaggacgcggcggcgctgcggttcgtcgccgcggccgtcgacggggtctcccccgatggcgcccgcgctcacgccgtcgagatccacccgggggtcaccaaggtcgtcgtccggggcctctcccccgccgacggcggcggcggggtcgacgacgatggggccgccgctttcgagctcgaccgctggcgcttccgcctcccgccctgcacgcgccctgccatggccacggccacctactcccagggcgagctcgtcgtcactgtccccaagggcgccggccccgacgacgcggccgctgtcctcggtggcacggagcgcgtcctcgtgcttgtatagtatatctacatgtcccgtccatgactcatctccactgctttgctgattcgcctgtttctattcctactactatactaataccaaatatttatttaaaaaaaaaaaaaaaa

SEQ ID NO: 33 - protein, 169 aa, Zea mays
  misc_feature: Ceres CLONE ID no.378863
  misc_feature: Bit score of 310.4 for HMM based on sequences of FIGURE 14.
  misc_feature: Functional Homolog Of Ceres CLONE ID no. 14572 at SEQ ID NO. 2
MRVHPAPRKRTIAVQRCATAAAAAAAGALGGKKLRRLPHIFAKVLELPFAADADVSVEEDAAALRFVAAAVDGVSPDGARAHAVEIHPGVTKVVVRGLSPADGGGGVDDDGAAAFELDRWRFRLPPCTRPAMATATYSQGELVVTVPKGAGPDDAAAVLGGTERVLVLV

SEQ ID NO: 34 - DNA, 1043 bp, Gossypium hirsutum
  misc_feature: Ceres CLONE ID no.1930271
  misc_feature: Encodes the peptide sequence at SEQ ID NO 35
tattgtgacggtgcctaagggagagcttggtggtggtgtgagaaatggtaacactaataataacaggtttgttcttgtacaataaaacaatatgtgatctttgctgtgttttaattgcatgttctttcgttgtccttgtccaagagctgtttttcatgtatggttattattcaataaaatgaagaaaaatttccttcaaaaaaaaaaaaaaaaaaaaaaaaaaaaaaaattctttaaaaaagaaaaaaaaaaaaaattgttttttttttaaaaaattgaaaccattgatattatratttcacttcyctcactgcataacttgatcaaaattttgatcccaaatccaaatttctttacttttgttcttcaccaaagcaccattttgtgttaccattaatttctttttccaaggattattgaaaaacttccctaaaccctcatatctgaaaccatgagaatccacccatcgcctaaraaaaraaacattgccatccaatatgagatggacccaagatctgaagccgagagacctcgcaagaagctcaggcggttgcctcacctcttcggccgcgttttggaactgccatttaggtcggacgccgacgtgacggtggaagaaagctccgatcgtttcaagtttgtggctgaaacggacgagaggattggcgatgtcgtgagggctcatgcgatggaaatccaccctggggttaccaggatcgtaataaggtcagaaaatttggtggatttttgttcattggatcatatagtgctcgacatgtggcgattcaggttgccggagatggcacgaccagagctggctagtgctatttacgaggatggggagcttattgtgacggtgcctaagggagagcttggtggtggtgtgagaaatggtaacactaataataacaggtttgttcttgtacaataaaacaatatgtgatctttgctgtgttttaattgcatgttctttcgttgtccttgtccaagagctgtttttcatgtatggttattattcaataaaatgaagaaaaatttccttc

SEQ ID NO: 35 - protein, 159 aa, Gossypium hirsutum
  misc_feature: Ceres CLONE ID no.1930271
  misc_feature: Bit score of 279.5 for HMM based on sequences of FIGURE 14.
  misc_feature: Functional Homolog Of Ceres CLONE ID no. 14572 at SEQ ID NO. 2
  misc_feature (8)..(8): Xaa is any aa, unknown, or other
  misc_feature (10)..(10): Xaa is any aa, unknown, or other
MRIHPSPXKXNIAIQYEMDPRSEAERPRKKLRRLPHLFGRVLELPFRSDADVTVEESSDRFKFVAETDERIGDVVRAHAMEIHPGVTRIVIRSENLVDFCSLDHIVLDMWRFRLPEMARPELASAIYEDGELIVTVPKGELGGGVRNGNTNNNRFVLVQ

SEQ ID NO: 36 - DNA, 706 bp, Panicum virgatum
  misc_feature: Ceres CLONE ID no.2034728
  misc_feature: Encodes the peptide sequence at SEQ ID NO 37
gtccaaataggcaaataccagcgagagcagaggagacaccacgaaaggaacccgagagaaggggtcttggcttgttgcgagcacatgaggatccacccagcagcagctcccgccggcggcaagaaggacctccgccggctgccgcacgtgtacagcaaggtgctcgagctgccgctcccggcggacactgacgtcgaggtgttcgaaggccccgacgccctccacttcgttgccgccgatgcccgtggcgccggcgtggtgcaggtgcgcaccgtgaggatccaccccggggttaccaaggtagtggtgcaggcaggaggcaccggcggcggtgagaaggctggcgccgatgacatggagcttgacaggtggcggtcccggttgcccgaggcgagtcatcttgcgatggcggtggccgggtacgtcgacgggaagctcgttgtgacagtgccaaagggccgtgatggcgccgccgtgatggcggtgaaggcgccgatgccagccaaggtgaggttacctggagaagctgcagtggaggaaagatcagtggaagactggtggttgtacagtagtagtagactatatagtgcggtggttgttcatctaatccactatctagtaatgtcttgccatctttgtttttttttcctgaagatgggctgtttattatgttacttcccttgcctggttttagcatcagatgttt

SEQ ID NO: 37 - protein, 207 aa, Panicum virgatum
  misc_feature: Ceres CLONE ID no.2034728
  misc_feature: Bit score of 234.6 for HMM based on sequences of FIGURE 14.
  misc_feature: Functional Homolog Of Ceres CLONE ID no. 14572 at SEQ ID NO. 2
MRIHPAAAPAGGKKDLRRLPHVYSKVLELPLPADTDVEVFEGPDALHFVAADARGAGVVQVRTVRIHPGVTKVVVQAGGTGGGEKAGADDMELDRWRSRLPEASHLAMAVAGYVDGKLVVTVPKGRDGAAVMAVKAPMPAKVRLPGEAAVEERSVEDWWLYSSSRLYSAVVVHLIHYLVMSCHLCFFFLKMGCLLCYFPCLVLASDV

SEQ ID NO: 38 - DNA, 714 bp, Panicum virgatum
  misc_feature: Ceres CLONE ID no.1866421
  misc_feature: Encodes the peptide sequence at SEQ ID NO 39
aaaggaaacaccacgaaaggaacccgaaagagggggaaaaaaacttcggttttggagctcttggcttgttgcgagcacatgaggatccacccagcagcagcagctcccgccggcggcaaaaaggacctccgccggcttccgcacgtgtacagcaaggggctcgagctgctgctcccggcggacaccgacgtcaaggggttcaaaggccccaaccccttccacttcgtcgccgccggtgcgcgaggcgccggcgtggtgcaggtgcgcaccgggaggatccaccccggggttaccaaggtagtggtgcaggcaggtggcgccggaggcgctaaggaggctggcgccaacaacatgaagctcgtcaccatcctcagcgtctgcctcaccatgtacggcgtcccctccttcaacaaggggaacccgtccacggcgcccacgctcacgctcacggggcgcaaaaaggaggccaacaagctgcaaaccgccaacgggtgggccaagttcaccgaaggcttcttcttcggcggcatctccggcgtgctctgggcatacttcctcctctacgtgctcaacctcccctactacttcaagtagacgtacgggctccatatgcaaatcccctcctctctacacatgtgggtaggtgatgtttgtgtggttcttgattgagcagtgatcgagcacgtgtataaattaatgtattactttctctgg

SEQ ID NO: 39 - protein, 171 aa, Panicum virgatum
  misc_feature: Ceres CLONE ID no.1866421
  misc_feature: Bit score of 87.7 for HMM based on sequences of FIGURE 14.
  misc_feature: Functional Homolog Of Ceres CLONE ID no. 14572 at SEQ ID NO. 2
MRIHPAAAAPAGGKKDLRRLPHVYSKGLELLLPADTDVKGFKGPNPFHFVAAGARGAGVVQVRTGRIHPGVTKVVVQAGGAGGAKEAGANNMKLVTILSVCLTMYGVPSFNKGNPSTAPTLTLTGRKKEANKLQTANGWAKFTEGFFFGGISGVLWAYFLLYVLNLPYYFK

SEQ ID NO: 40 - DNA, 516 bp, Populus balsamifera subsp. trichocarpa
  misc_feature: Ceres ANNOT ID no.1512656
  misc_feature: Encodes the peptide sequence at SEQ ID NO 41
atgaaggttcacccattacccaagaaaagaaacattaccatccaattctacccattaacatcttctgcaggtgggttccaaaacaagaaacttaggaggctaccccacatattcagccggatcttggaactccccttccggtcagatgctgatgtgtcggtcgaggaaaatcccgattgtttccgatttgtagctgaaactgatgataacattggtgatatgagggcccacacagttgaaatccaccctggagtcattaaaattgtgattaggccaaatgggtatcttgaattatcgtcacttgacgatttagagttggatatgtggagattccgtttaccggaaaccaccaggccggagcttgcgagtgcggttcttgctgacggagagttgattgtgacggtgccaaaaggagagggggaggggggggatgggaatggtaataataacaacggggagtttagaggaggtatgggaaataacaataataatgctaggcttgtgcttgtacagtga

SEQ ID NO: 41 - protein, 171 aa, Populus balsamifera subsp. trichocarpa
  misc_feature: Ceres ANNOT ID no.1512656
  misc_feature: Bit score of 416.5 for HMM based on sequences of FIGURE 14.
  misc_feature: Functional Homolog Of Ceres CLONE ID no. 14572 at SEQ ID NO. 2
MKVHPLPKKRNITIQFYPLTSSAGGFQNKKLRRLPHIFSRILELPFRSDADVSVEENPDCFRFVAETDDNIGDMRAHTVEIHPGVIKIVIRPNGYLELSSLDDLELDMWRFRLPETTRPELASAVLADGELIVTVPKGEGEGGDGNGNNNNGEFRGGMGNNNNNARLVLVQ

SEQ ID NO: 42 - DNA, 543 bp, Populus balsamifera subsp. trichocarpa
  misc_feature: Ceres ANNOT ID no.1463492
  misc_feature: Encodes the peptide sequence at SEQ ID NO 43
atgaaggtgcatccattacccaagaagagaaacaacataacaatccaattctacgatcatagaggagaccctttagtatcatcttctggtgggtcccaacacaagaaactcaggaggctaccccacatattcagccgggtcttggaactccccttccggtcagatgctgacgtgtcggttgaggaaaatcctgattgctttcgatttgttgctgaaacagataataacatcggtgaagtgagggcccacaccgttgaaatctatcctggagtaactaaaattgtgattaggccaaatgggtatctagatatatctccacttgatgatttggagttggatatgtggaggttccggttgccggaaaccaccaggccggagcttgcgagtgcggttctggctgacggagagttgattgtgacggttccgaaaggagaggaagtggaggaggaagggaatggtaataataacaatggcgagtttagaggaggtatgggaaataatagtagtaataataataatgctaggcttgtgcttgtacagtga

SEQ ID NO: 43 - protein, 180 aa, Populus balsamifera subsp. trichocarpa
  misc_feature: Ceres ANNOT ID no.1463492
  misc_feature: Bit score of 394.1 for HMM based on sequences of FIGURE 14.
  misc_feature: Functional Homolog Of Ceres CLONE ID no. 14572 at SEQ ID NO. 2
MKVHPLPKKRNNITIQFYDHRGDPLVSSSGGSQHKKLRRLPHIFSRVLELPFRSDADVSVEENPDCFRFVAETDNNIGEVRAHTVEIYPGVTKIVIRPNGYLDISPLDDLELDMWRFRLPETTRPELASAVLADGELIVTVPKGEEVEEEGNGNNNNGEFRGGMGNNSSNNNNARLVLVQ

SEQ ID NO: 44 - DNA, 561 bp, Populus balsamifera subsp. trichocarpa
  misc_feature: Ceres ANNOT ID no.1459391
  misc_feature: Encodes the peptide sequence at SEQ ID NO 45
atgaaggttcacccattacccaagaaaagaaacattaccatccaattctacccattaacatcttctgcaggtgggttccaaaacaagaaacttaggaggctaccccacatattcagccggatcttggaactccccttccggtcagatgctgatgtgtcggtcgaggaaaatcccgattgtttccgatttgtagctgaaactgatgataacattggtgatatgagggcccacacagttgaaatccaccctggagtcattaaaattgtgattaggccaaatgggtatcttgaattatcgtcacttgacgatttagagttggatatgtggagattccgtttaccggaaaccaccaggccggagcttgcgagtgcggttcttgctgacggagagttgattgtgacggtgccaaaaggagagggggaggggggggatgggaatggtaataataacaacggggagtttagaggagcgtgtgttgataacgattatggtagcagtagcattgaatatggaagtttgagactgggtagttcatcatgttttggcatgctccgatactaa

SEQ ID NO: 45 - protein, 186 aa, Populus balsamifera subsp. trichocarpa
  misc_feature: Ceres ANNOT ID no.1459391
  misc_feature: Bit score of 367.2 for HMM based on sequences of FIGURE 14.
  misc_feature: Functional Homolog Of Ceres CLONE ID no. 14572 at SEQ ID NO. 2
MKVHPLPKKRNITIQFYPLTSSAGGFQNKKLRRLPHIFSRILELPFRSDADVSVEENPDCFRFVAETDDNIGDMRAHTVEIHPGVIKIVIRPNGYLELSSLDDLELDMWRFRLPETTRPELASAVLADGELIVTVPKGEGEGGDGNGNNNNGEFRGACVDNDYGSSSIEYGSLRLGSSSCFGMLRY

SEQ ID NO: 46 - DNA, 504 bp, Populus balsamifera subsp. trichocarpa
  misc_feature: Ceres ANNOT ID no.1442920
  misc_feature: Encodes the peptide sequence at SEQ ID NO 47
atgaaggtccacccaactccaaagaagcgaagcattaccaccacccaatacaacgatgcttctcgcacccacaccccaaacgcaaagaagctaaaaagactccctcacgtatttgctagagtactggaacttccattccactcagatactgacgttttggtccaagaaactccagattctttccgtttcgtggcaaacagtgagaacataaccattcccgatgattatcaagcccgcgtagttgagatatttccagggctgacaaagatcgtggtaattaaagaaacagacagcggtgatcattatccttccatggatgaacttgaaatcgacacgtggaggtgtcggctcccggccacggtgcgcccggagatggcgagtgcaaggtgtattgaaggacagttggttgttactgttccaaagaccctgaatttggagaattttgctggtgggcaaaatgttgatgacgaagcaaatataagttggcttgatggattgctttga

SEQ ID NO: 47 - protein, 167 aa, Populus balsamifera subsp. trichocarpa
  misc_feature: Ceres ANNOT ID no.1442920
  misc_feature: Bit score of 199.8 for HMM based on sequences of FIGURE 14.
  misc_feature: Functional Homolog Of Ceres CLONE ID no. 14572 at SEQ ID NO. 2
MKVHPTPKKRSITTTQYNDASRTHTPNAKKLKRLPHVFARVLELPFHSDTDVLVQETPDSFRFVANSENITIPDDYQARVVEIFPGLTKIVVIKETDSGDHYPSMDELEIDTWRCRLPATVRPEMASARCIEGQLVVTVPKTLNLENFAGGQNVDDEANISWLDGLL

SEQ ID NO: 48 - DNA, 534 bp, Sorghum bicolor
  misc_feature: Ceres ANNOT ID no.6011447
  misc_feature: Encodes the peptide sequence at SEQ ID NO 49
atgagggtccacccggccccgcggaagcgcaccatcgcggtgcagcgctgcgccacggcggcggcggcggcgggcgcggtcggcgggaagaagctgcgccggctgccgcacatcttcgccaaggtgctggagctcccgttcgcggccgacgcggacgtgtccgtggaggaggacgccgccgcgctgcggttcgtcgccgccgccgtcgtcgacgtcgacgggttctccttctcccccgcgggtggcccccgcgcgcacgccgtcgagatccacccgggggtcaccaaggtcgtcgtccggggcctgtcctccggcgcccacgatgacgacgacgatggggcagccgccgccttcgagctcgaccgctggcggttccgcctcccgccctgcacgcgccccgccatggccaccgccacctacgcccagggcgagctcgtcgtcaccgtccccaagggcgccggccccgacgacggcgacggcgatgcggccgctgctgccctcggtggcacggaccgcgtcctcgtgcttgtatag

SEQ ID NO: 49 - protein, 177 aa, Sorghum bicolor
  misc_feature: Ceres ANNOT ID no.6011447
  misc_feature: Bit score of 324.3 for HMM based on sequences of FIGURE 14.
  misc_feature: Functional Homolog Of Ceres CLONE ID no. 14572 at SEQ ID NO. 2
MRVHPAPRKRTIAVQRCATAAAAAGAVGGKKLRRLPHIFAKVLELPFAADADVSVEEDAAALRFVAAAVVDVDGFSFSPAGGPRAHAVEIHPGVTKVVVRGLSSGAHDDDDDGAAAAFELDRWRFRLPPCTRPAMATATYAQGELVVTVPKGAGPDDGDGDAAAAALGGTDRVLVLV

SEQ ID NO: 50 - DNA, 510 bp, Sorghum bicolor
  misc_feature: Ceres ANNOT ID no.6068218
  misc_feature: Encodes the peptide sequence at SEQ ID NO 51
atgaggatccacccagcatctcccaccgtcgtcggcggcggtggcggcaagaaggacctccggcgtctgccgcacgtgtacagcaaggtgctggagctgccgctcccggcggacaccgacgtcgaggtgttcgaaggccccgacgccttccacttcgtcgcggcgccgcccgccggcggtggtgcgcgtggcgccggcgtcgtgcgggtgcgcaccgtcaggatccaccccggggtcaccaaggtcgtcgtgcaggccggcgacgccgccgagggggttgctgacgacgacgacgccggcgacagcatggagctcgacaggtggcggtcccgcctgcccgagccgagctgtccggccatggcggtggctgggtacgtcgacggccagctcgtcgtgacagtgcccaagggccccggtggcggtgaaggcggcgacggcgggcaaggtgaggttacctggaggtgcagtggcggggggaagattagtggaagactggtgcttgtacagtag

SEQ ID NO: 51 - protein, 169 aa, Sorghum bicolor
  misc_feature: Ceres ANNOT ID no.6068218
  misc_feature: Bit score of 323.4 for HMM based on sequences of FIGURE 14.
  misc_feature: Functional Homolog Of Ceres CLONE ID no. 14572 at SEQ ID NO. 2
MRIHPASPTVVGGGGGKKDLRRLPHVYSKVLELPLPADTDVEVFEGPDAFHFVAAPPAGGGARGAGVVRVRTVRIHPGVTKVVVQAGDAAEGVADDDDAGDSMELDRWRSRLPEPSCPAMAVAGYVDGQLVVTVPKGPGGGEGGDGGQGEVTWRCSGGGKISGRLVLVQ

SEQ ID NO: 52 - DNA, 771 bp, Sorghum bicolor
  misc_feature: Ceres ANNOT ID no.6044121
  misc_feature: Encodes the peptide sequence at SEQ ID NO 53
atggacccgccagggaacctcagcggcccaggaacctcaccgtcctttcaaggtggcccgtttgaagctaaaactctaaaagtgctaacttatgctgctaatggaggtcatatcatagtcagaggtcttaaggacaatgtcagtacatgtgggccatataatttgggtggttctaccacacaacggatgggtacagagttgcattatcaggccccaatttcattgtccccaaagatgaggcagaacaccaagattgtgtcaagatatgctgaatcagcgcctggtacgttgtggaggaggaaaaaaaggtcagcgggaagactgcgctggctgccgcacatcttcgccaaggtgctggagctcccgttcgcggccgacgcggacgtgtccatcgaggaggacgcggcagcgttgcagttcgtcgccgccgccgtcgtcgacgtcgacgggttctccttctcccccgcaggtggctcccgcgcgcacgccgtcaagatccacccgggggtcaccaaggtcgtcgtccggggcctgtcctttggcgccaacgacgacgacgatggggcaggcgccgccttcgagctcgaccgctggcggttccgcctccctccctgcacgcgccccgccatggccaccgccacctacgcccagggcgagctcgtcgtcaccgtccccaagggcgccggccccgacgacggcgacggcgacggcgacggcgatgcggccactgctgccctcggtggcacggaccgcgtcctcgtgcttgtatag

SEQ ID NO: 53 - protein, 256 aa, Sorghum bicolor
  misc_feature: Ceres ANNOT ID no.6044121
  misc_feature: Bit score of 241.0 for HMM based on sequences of FIGURE 14.
  misc_feature: Functional Homolog Of Ceres CLONE ID no. 14572 at SEQ ID NO. 2
MDPPGNLSGPGTSPSFQGGPFEAKTLKVLTYAANGGHIIVRGLKDNVSTCGPYNLGGSTTQRMGTELHYQAPISLSPKMRQNTKIVSRYAESAPGTLWRRKKRSAGRLRWLPHIFAKVLELPFAADADVSIEEDAAALQFVAAAVVDVDGFSFSPAGGSRAHAVKIHPGVTKVVVRGLSFGANDDDDGAGAAFELDRWRFRLPPCTRPAMATATYAQGELVVTVPKGAGPDDGDGDGDGDAATAALGGTDRVLVLV

SEQ ID NO: 54 - DNA, 396 bp, Sorghum bicolor
  misc_feature: Ceres ANNOT ID no.6100755
  misc_feature: Encodes the peptide sequence at SEQ ID NO 55
atggtgctggagctcccgttcgcagccgaggtggacgtgtccgtcgaggaggacgcggcagcgctgcggttcgtcgtcgacgtcaacgggttctcctcccccgcgggtggcccccgcgcgcacgccgtcgagatccacccgggggtcaccaaggtcgtcctccggggcctgtccttcggcgcccacgacgacgacgatggggcaggcgccgccttcgagctcgaccgctggcggttccgcctccctccctgcacgcgccccgccgtggccaccgccacctacgcccagggcgagctcgtcgtcaccgtccccaagggcgccggccccgacgacggcgacggcgatgcgaccgctgctgccctcggtggcacggaccgcgtcctcgtgcttgtatag

SEQ ID NO: 55 - protein, 131 aa, Sorghum bicolor
  misc_feature: Ceres ANNOT ID no.6100755
  misc_feature: Bit score of 159.0 for HMM based on sequences of FIGURE 14.
  misc_feature: Functional Homolog Of Ceres CLONE ID no. 14572 at SEQ ID NO. 2
MVLELPFAAEVDVSVEEDAAALRFVVDVNGFSSPAGGPRAHAVEIHPGVTKVVLRGLSFGAHDDDDGAGAAFELDRWRFRLPPCTRPAVATATYAQGELVVTVPKGAGPDDGDGDATAAALGGTDRVLVLV

SEQ ID NO: 56 - DNA, 546 bp, Arabidopsis thaliana
  misc_feature: Ceres CLONE ID no.263956
  misc_feature: Inplanta Sequence
  misc_feature: Encodes the peptide sequence at SEQ ID NO. 57
atcaatcaccaaaacacattcattgtcttaaaccctaaacctcaagaaccgaacaaccacaccaaaaaatgagaccggttggcttgatctttacggtcatgttcttggtctcggccttttcggaatcaagaaccgcggattgcagagttctccttggtggttcgacggaggaaatcgatcaatctaaaattcatggggtcgatttacgaagtgaagacttattaggggtcgtgatacatggttataagaagctaaggtggctctcatcggccggggagaggatgcatacaatggcttcaggaccgagcaggagaggtgctggtcactaaaatacgaacccaaacaaaacattatacttcgatatttgtttagctcaggtcatagaatcatatttttcattttttatagattattatatttattcagtcgctaaagatccatgtaaagtttagaagggtgatattctttgatcatacaatagtcggtttccttctcataaacaccaatttatagtacgtgcccattaatcgatatttattttagttt

SEQ ID NO: 57 - protein, 86 aa, Arabidopsis thaliana
  misc_feature: Ceres CLONE ID no.263956
MRPVGLIFTVMFLVSAFSESRTADCRVLLGGSTEEIDQSKIHGVDLRSEDLLGVVIHGYKKLRWLSSAGERMHTMASGPSRRGAGH

SEQ ID NO: 58 - DNA, 839 bp, Arabidopsis thaliana
  misc_feature: Ceres CLONE ID no.31309
  misc_feature: Expected Sequence
  misc_feature: Encodes the peptide sequence at SEQ ID NO. 60
atataagtctttctcactccttctctttcctttgtgattcatatccttcttcttctccaagaacctctctctctttctgcttctctatattttaacactttcttccgaatttgcccctcaagttttattttaattgctaaaatggctggaaccctagttaactccgccgggagattctcaccgggaaattgtattcttcctcaacagagaacagccagattctacagcggaaccgcgagatttcccaccggagctccttcgtttaaggctttcagctcagacgcttaacgccgagccagctgtaacggaatccgttcgtcggagagtttctagcctctacgaattactgaaagtgaatgaaacggcgtccttgacggagatcaagacggcgtaccggagcttagctaaagtatatcatccagatgcgtcggaatcggacggtcgagatttcatggagattcacaaagttacgcgacacttgcggatccgactacaagagcgatttacgactcgacgcttagagtaccacggagacgggtacacgccggagcgatgggtcggtcggggcgggtttacgctacgacccggagatgggagacggatcagtgttggtgattttaggcttcctatgattttgcagcagcgaaagggcactttttgacttactttcccctttgattacgttttttttttccttgtcatatctttggaaaattaaggggaaattaagtttaatccgctctttttttttttttttgtttttcttttaacttaagcagttaacaatgtataaagaagttatgagtagagaaatgtatatgattttagttttctccttt

SEQ ID NO: 59 - DNA, 838 bp, Arabidopsis thaliana
  misc_feature: Ceres CLONE ID no.31309
  misc_feature: Inplanta Sequence
  misc_feature: Encodes the peptide sequence at SEQ ID NO. 60
atataagtctttctcactccttctctttcctttgtgattcatatccttcttcttctccaagaacctctctctctttctgcttctctatattttaacactttcttccgaatttgcccctcaagttttattttaattgctaaaatggctggaaccctagttaactccgccgggagattctcaccgggaaattgtattcttcctcaacagagaacagccagattctacagcggaaccgcgagatttcccaccggagctccttcgtttaaggcttcagctcagacgcttaacgccgagccagctgtaacggaatccgttcgtcggagagtttctagcctctacgaattactgaaagtgaatgaaacggcgtccttgacggagatcaagacggcgtaccggagcttagctaaagtatatcatccagatgcgtcggaatcggacggtcgagatttcatggagattcacaaagcttacgcgacacttgcggatccgactacaagagcgatttacgactcgacgcttagagtaccacggagacgggtacacgccggagcgatgggtcggtcggggcgggtttacgctacgacccggagatgggagacggatcagtgttggtgattttaggcttcctatgattttgcagcagcgaaagggcactttttgacttactttcccctttgattacgttttttttttccttgtcatatctttggaaaattaaggggaaattaagtttaatccgctcttttttttttttttttttttttttaacttaaagcgttaaaaattgttaaaaaaatttttaattaaaaaattttttttttttttttttttccctttt

SEQ ID NO: 60 - protein, 157 aa, Arabidopsis thaliana
  misc_feature: Ceres CLONE ID no.31309
  misc_feature: Bit score of 386.5 for HMM based on sequences of FIGURE 10.
  misc_feature (64)..(123): Pfam Name: DnaJ Pfam Description: DnaJ domain
MAGTLVNSAGRFSPGNCILPQQRTARFYSGTARFPTGAPSFKASAQTLNAEPAVTESVRRRVSSLYELLKVNETASLTEIKTAYRSLAKVYHPDASESDGRDFMEIHKAYATLADPTTRAIYDSTLRVPRRRVHAGAMGRSGRVYATTRRWETDQCW

SEQ ID NO: 61 - DNA, 750 bp, Brassica napus
  misc_feature: Ceres CLONE ID no.872030
  misc_feature: Encodes the peptide sequence at SEQ ID NO 62
ctcttattactgatacttatcttctgcttctcagaggaactctctctgcttaatccaatcttaacgcgttctttcgaatttgcccctccaattttaatttaattacgtaaatgtccggaactctaatctactctgccgttaactcccttcgatcctcgccgggaaatagccttcgtcaaccgaagccaaccagactccacaacggaaacgcgcggtttcccaccggagctacgtcgtttagagcttcggcagcgcagactctcaacgccgagccagccgtaacggaatccgttcgccggcgagcgtcgagcctctacgaactgctgagagtcgacgaaacggcgtcgttgacggagattaagacggcgtatcggagcttagctaaggttcaccatcctgatgcgtcgtcggaatcggacggacgagatttcatggagatccacaaagcttacgcgacgctggcggatccgacgaccagagcgatctacgattcgacgctgggagcacgagggagacgaatgcacgctggagctacgggtcggacgagtcgggtttacccgacgacccggagatgggagacggatcagtgttggtagtttagtctttaggtttccgttacttttttttactctatttccccctttcattattttttaactaaggggtaaataagtttttactagcctttttttttttaacttaaagaaggtaacaatgtgtcacagatggttaatgaatagagagatgtac

SEQ ID NO: 62 - protein, 161 aa, Brassica napus
  misc_feature: Ceres CLONE ID no.872030
  misc_feature: Bit score of 389.8 for HMM based on sequences of FIGURE 10.
  misc_feature (67)..(127): Pfam Name: DnaJ Pfam Description: DnaJ domain
  misc_feature: Functional Homolog Of Ceres CLONE ID no. 31309 at SEQ ID NO. 60
MSGTLIYSAVNSLRSSPGNSLRQPKPTRLHNGNARFPTGATSFRASAAQTLNAEPAVTESVRRRASSLYELLRVDETASLTEIKTAYRSLAKVHHPDASSESDGRDFMEIHKAYATLADPTTRAIYDSTLGARGRRMHAGATGRTSRVYPTTRRWETDQCW

SEQ ID NO: 63 - protein, 369 aa, Arabidopsis thaliana
  misc_feature: Public GI ID no.18399940
  misc_feature: Bit score of 670.7 for HMM based on sequences of FIGURE 9.
  misc_feature (116)..(349): Pfam Name: Trehalose_PPase Pfam Description: Trehalose-phosphatase
  misc_feature: Functional Homolog Of Ceres SEEDLINE ID no. ME20095 at SEQ ID NO. 1129
MTNHNALISDAKGSIGVAVRVPNQSLFSPGGGRYISIPRKKLVQKLEADPSQTRIHTWIEAMRASSPTRTRPGNISPLPESDEEDEYSSWMAQHPSALTMFEEIAEASKGKQIVMFLDYDGTLSPIVENPDRAYMSEEMREAVKGVARYFPTAIVTGRCRDKVRRFVKLPGLYYAGSHGMDIKGPSKRNKHNKNNKGVLFQAANEFLPMIDKVSKCLVEKMRDIEGANVENNKFCVSVHYRCVDQKDWGLVAEHVTSILSEYPKLRLTQGRKVLEIRPTIKWDKGKALEFLLESLGFANSNDVLPIYIGDDRTDEDAFKVLRNKGQGFGILVSKIPKETSATYSLQEPSEVGEFLQRLVEWKQMSLRGR

SEQ ID NO: 64 - protein, 160 aa, Arabidopsis thaliana
  misc_feature: Public GI ID no.15227919
  misc_feature: Bit score of 174.9 for HMM based on sequences of FIGURE 10.
  misc_feature (68)..(132): Pfam Name: DnaJ Pfam Description: DnaJ domain
  misc_feature: Functional Homolog Of Ceres CLONE ID no. 31309 at SEQ ID NO. 60
MLSSSPTFFATPFLSSSSSSSPSFSSTSPPSRISRISPSLSTTTASYTCAEDLPRLRQIPQRFSATASLYEILEIPVGSTSQEIKSAYRRLARICHPDVARNSRDNSSADDFMKIHAAYCTLSDPEKRAVYDRRTLLRSRPLTAGYGSYGGRNWETDQCW

SEQ ID NO: 65 - protein, 161 aa, Arabidopsis thaliana
  misc_feature: Public GI ID no.9843641
  misc_feature: Bit score of 165.4 for HMM based on sequences of FIGURE 10.
  misc_feature (65)..(130): Pfam Name: DnaJ Pfam Description: DnaJ domain
  misc_feature: Functional Homolog Of Ceres CLONE ID no. 31309 at SEQ ID NO. 60
MLSSSPTSFTHPFLSSSPPLSPISPPSRTARISPPLVSASCSYTYTEDSPRLHQIPRRLTTVPASLYDVLEVPLGATSQDIKSAYRRLARICHPDVAGTDRTSSSSADEFMKIHAAYCTLSDPEKRSVYDRRMLRRSRPLTVGTSGLGRYVGRNWETDQCW

SEQ ID NO: 66 - protein, 155 aa, Solanum lycopersicum
  misc_feature: Public GI ID no.124294789
  misc_feature: Bit score of 162.2 for HMM based on sequences of FIGURE 10.
  misc_feature (61)..(120): Pfam Name: DnaJ Pfam Description: DnaJ domain
  misc_feature: Functional Homolog Of Ceres CLONE ID no. 31309 at SEQ ID NO. 60
MASSSFLLSTSITGSKLSAAAPPRSSVSFKQRPFSVSAAYSTAERTSTATTSSSTIASHTSLYEVLGIRFGANSHEIKSAYRKLARILHPDVRNSSAEDFIRVQSAYATLSDPEKRANYDRNLFGNRIARPVDFSTAGARSHYTVRRGWETDQCW

SEQ ID NO: 67 - protein, 161 aa, Arabidopsis thaliana
  misc_feature: Public GI ID no.15233446
  misc_feature: Bit score of 162.1 for HMM based on sequences of FIGURE 10.
  misc_feature (65)..(130): Pfam Name: DnaJ Pfam Description: DnaJ domain
  misc_feature: Functional Homolog Of Ceres CLONE ID no. 31309 at SEQ ID NO. 60
MLSSSPTSFTHPFLSSSPPLSPISPPSRTARISPPLVSASCSYTYTEDSPRLHQIPRRLTTVPASLYDVLEVPLGATSQDIKSAYRRLARICHPDVAGTDRTSSSSADEFMKIHAAYCTLSDPEKRSVYDRRMLRRSRPLTVGTSGLGSYVGRNWETDQCW

SEQ ID NO: 68 - protein, 198 aa, Oryza sativa subsp. japonica
  misc_feature: Public GI ID no.115477679
  misc_feature: Bit score of 113.2 for HMM based on sequences of FIGURE 10.
  misc_feature (96)..(156): Pfam Name: DnaJ Pfam Description: DnaJ domain
  misc_feature: Functional Homolog Of Ceres CLONE ID no. 31309 at SEQ ID NO. 60
MWVRERRSRASNMRERSSSAGPHRDANNPWCRSPILRDRSASCPPFLSSFLLMISAPSVGIAFAPKPPPAAAVGSYRARKVRCAVAVAPAPAPAGTLYDVLGLRAGATVREIKAAYRRLARERHPDVAASAGADDFVRLHDAYATLSDPDSRARYDRDVVAVASMARGAHHRTMAAPAAAPRWYGRRPRRTWETDQCW

SEQ ID NO: 69 - protein, 146 aa, Oryza sativa subsp. japonica
  misc_feature: Public GI ID no.42407552
  misc_feature: Bit score of 106.0 for HMM based on sequences of FIGURE 10.
  misc_feature (44)..(104): Pfam Name: DnaJ Pfam Description: DnaJ domain
  misc_feature: Functional Homolog Of Ceres CLONE ID no. 31309 at SEQ ID NO. 60
MISAPSVGIAFAPKPPPAAAVGSYRARKVRCAVAVAPAPAPAGTLYDVLGLRAGATVREIKAAYRRLARERHPDVAASAGADDFVRLHDAYATLSDPDSRARYDRDVVAVASMARGAHHRTMAAPAAAPRWYGRRPRRTWETDQCW

SEQ ID NO: 70 - protein, 146 aa, Oryza sativa subsp. indica
  misc_feature: Public GI ID no.125562450
  misc_feature: Bit score of 105.7 for HMM based on sequences of FIGURE 10.
  misc_feature (44)..(104): Pfam Name: DnaJ Pfam Description: DnaJ domain
  misc_feature: Functional Homolog Of Ceres CLONE ID no. 31309 at SEQ ID NO. 60
MISAPSVGIAFAPKPPPAAAVGSYRARKVRCAVAVAPAPAPAGTLYDVLGLRAGATVREIKAAYRRLARERHPDVAASAGADDFVRLHDAYATLSDPDSRARYDRDVVAIASMARGAHHRTMAAPAAAPRWYGRRPRRTWETDQCW

SEQ ID NO: 71 - protein, 133 aa, Oryza sativa subsp. japonica
  misc_feature: Public GI ID no.115469980
  misc_feature: Bit score of 96.6 for HMM based on sequences of FIGURE 10.
  misc_feature (44)..(103): Pfam Name: DnaJ Pfam Description: DnaJ domain
  misc_feature: Functional Homolog Of Ceres CLONE ID no. 31309 at SEQ ID NO. 60
MASFASTAAPWGCVAGARRGGGGGGRCGVRASAALAVAAPAARTHYEVLGVGAGASRGEIKAAYRRLAREVHPDAGATGDEDFIRLHAAYATLADPDERARYDRAMAGPAASAFRRAPASSFRRRTWETDQCW

SEQ ID NO: 72 - DNA, 1149 bp, Sorghum bicolor
  misc_feature: Ceres ANNOT ID no.6107929
  misc_feature: Encodes the peptide sequence at SEQ ID NO 73
atggatttgaagacaggcctcaattcacctgttattgctgaccatctccctacgttagcatcacctgctgctgtcatgactttcacaacacctactagctttccctctccggggctttgcttgaacactacaaagaagatacctctacctggtaagattgaagaagttcgtgctactggatggcttgacctcatgaaggcctcatcacctacccgcaaaaggcagaccaaggatgccatctgtgatactcaatctgatgatcttgatttgcaataccgcaactggacggtgaactatccttctgctttgacctcatttgaggaaattagtgatcttgctgggaataaaagattggcattgtttcttgattatgatggaacactttcaccgattgtggacaatcctgaaaatgcattaatgtctgatgagatgcgtgctgcagtgaggcatgtggcatcacttttcccaactgcaatcattagcggaaggtctcgtgataaggtttttgactttgtcaacctaaatgaactatactacgctggaagccatggaatggacataatgggccctgttaggaagactactgactccaatggcgtggaatgtattcggtcaactgatgcgcatggtaaagaagtcaatctgttccaacctgctagtgagtttttacctatgatcactgaggtgtatgaaaaacttggtgagagtgttaaggacattgatggtgcaaggatggaagacaacaagttctgtgtgtctgtgcattaccgtaatgtggcggaagatgactataaaaaggttttccatcgtgtaagtgctgttttggaagattacccttgcctaagactaacccatgggagaaaggtttttgaggtccgtcctgttattgattggaacaaaggtaaagctgtggagtttttactcgaatcacttgggctcaacgagagtgaagatgttctccctatctatgttggagatgacagaacagatgaagatgcattcaaagttctgaaggcaagcaaccgtggctttggaatattggtgtcatctatacccaaagagagtgacgccttctattccttgagggatccagctgaggtgatggaatttctgagaatgttggcagcatggaaggagcagtccacctga

SEQ ID NO: 73 - protein, 382 aa, Sorghum bicolor
  misc_feature: Ceres ANNOT ID no.6107929
  misc_feature: Bit score of 823.3 for HMM based on sequences of FIGURE 9.
  misc_feature (121)..(365): Pfam Name: Trehalose_PPase Pfam Description: Trehalose-phosphatase
  misc_feature: Functional Homolog Of Ceres SEEDLINE ID no. ME20095 at SEQ ID NO. 1129
MDLKTGLNSPVIADHLPTLASPAAVMTFTTPTSFPSPGLCLNTTKKIPLPGKIEEVRATGWLDLMKASSPTRKRQTKDAICDTQSDDLDLQYRNWTVNYPSALTSFEEISDLAGNKRLALFLDYDGTLSPIVDNPENALMSDEMRAAVRHVASLFPTAIISGRSRDKVFDFVNLNELYYAGSHGMDIMGPVRKTTDSNGVECIRSTDAHGKEVNLFQPASEFLPMITEVYEKLGESVKDIDGARMEDNKFCVSVHYRNVAEDDYKKVFHRVSAVLEDYPCLRLTHGRKVFEVRPVIDWNKGKAVEFLLESLGLNESEDVLPIYVGDDRTDEDAFKVLKASNRGFGILVSSIPKESDAFYSLRDPAEVMEFLRMLAAWKEQST

SEQ ID NO: 74 - protein, 140 aa, Populus balsamifera subsp. trichocarpa
  misc_feature: Ceres CLONE ID no.100029223
  misc_feature: Bit score of 311.9 for HMM based on sequences of FIGURE 10.
  misc_feature (53)..(114): Pfam Name: DnaJ Pfam Description: DnaJ domain
  misc_feature: Functional Homolog Of Ceres CLONE ID no. 31309 at SEQ ID NO. 60
MYATLPSPFLPKSIHAFSPNKTSSSLRTSARAASFKSATATEGNSAAVALAGSLYEILRVERTASLNEIKTAYRSLAKVYHPDANRSSSDGRDFIEIRNAYATLSDPTARAVYDMSLGVRARRIRTRVYPIRRWETDQCW

SEQ ID NO: 75 - DNA, 987 bp, Populus balsamifera subsp. trichocarpa
  misc_feature: Ceres ANNOT ID no.1442539
  misc_feature: Encodes the peptide sequence at SEQ ID NO 76
atggcctccacaacttgtctcacgtcttttagctcctccgcgtctccttttattggctcaaaagtttccaccaatcagtctcattcaccaccaccgtctcgcgtcagcttccgcccctttcgagtgtccgccgcctgcgcttcaaccgccgagagacccacatcatgcattgcaacagcaacatctgcatcatctctttacgaagttcttggaattcaaatgggcgccacgtgtcaggagatcaagacagcttatcgaagactggctagaatcttgcatcctgatgttgcagctaacgggcaaagggaggacaaggcttacgagttcatgagagtccacgaagcttatgaaaccctgtctgatcctgaaaaacgtgcagattatgatcgctccctttatagacgaggaaggcaaatgggctctccgtttgtgatgtctgctgctactgtaacaacaatggcaacaggattttctgggtatacaagtcagagatgggaaactgaccagtgctggtgtagcgatttgaagtgcccaattcctctacttttaaagtggaaacgcaaaaagatggagcagttccaaaaagcaaaagcaaaagcaaaaacaagaacagtgacccaaagacaggctttgccagacagaaatatcaaatacactgaaagaagcacaagttctaagactcgctcgcactcttggtttgaattgaagcacagagcgaaaaaaacagctcaatgcatggaaaaatccatgccacgtattaacaagcaagacagcatttcaccaaaaacagaagaaaagaggagcaagacagcaaccttcaagtcaatggctccgttgtcgacttgtcggtgtcttgcgtttggttgcaatcgaactgaaatgggacaagaccagacatcctttcctgacgcggtatctccaaatgtggatgagatggcagccacaatcacacggattagactcaacaagcacacagctcagtcttag

SEQ ID NO: 76 - protein, 328 aa, Populus balsamifera subsp. trichocarpa
  misc_feature: Ceres ANNOT ID no.1442539
  misc_feature: Bit score of 174.6 for HMM based on sequences of FIGURE 10.
  misc_feature (65)..(129): Pfam Name: DnaJ Pfam Description: DnaJ domain
  misc_feature: Functional Homolog Of Ceres CLONE ID no. 31309 at SEQ ID NO. 60
MASTTCLTSFSSSASPFIGSKVSTNQSHSPPPSRVSFRPFRVSAACASTAERPTSCIATATSASSLYEVLGIQMGATCQEIKTAYRRLARILHPDVAANGQREDKAYEFMRVHEAYETLSDPEKRADYDRSLYRRGRQMGSPFVMSAATVTTMATGFSGYTSQRWETDQCWCSDLKCPIPLLLKWKRKKMEQFQKAKAKAKTRTVTQRQALPDRNIKYTERSTSSKTRSHSWFELKHRAKKTAQCMEKSMPRINKQDSISPKTEEKRSKTATFKSMAPLSTCRCLAFGCNRTEMGQDQTSFPDAVSPNVDEMAATITRIRLNKHTAQS

SEQ ID NO: 77 - DNA, 510 bp, Populus balsamifera subsp. trichocarpa
  misc_feature: Ceres ANNOT ID no.1442538
  misc_feature: Encodes the peptide sequence at SEQ ID NO 78
atggcttccacatcttctctagcgtctttcagctcctcctcttctcctttcattggctcaaagttctcgaccaatcagcctcattcgcttccatttcgtgccagcttccgccccttcagtgtctctgcctcctgcgcttccaccgccgagcgaccaccatcccgcaatgccacgcaaatatctctctacgaagttctcgggattcaaatgggtgccacttgccaggaaatcaaggctgcttacagaaagctagcaagaacattgcatcctgatgttgcagctaacgttcaaaaggaagacacagcttatgagttcattaaagtacacgaagcttatgaaactctgtcggaccctgacaaacgtgcagattatgaccgttcgctttttagacctggaaggcaaatgagctctccgtttgtaatgtctgcagcaacaatggaaacaaatgttgtagctgctggatttcctgcctacactaggcgaagatgggaaactgatcagtgctggtag

SEQ ID NO: 78 - protein, 169 aa, Populus balsamifera subsp. trichocarpa
  misc_feature: Ceres ANNOT ID no.1442538
  misc_feature: Bit score of 169.2 for HMM based on sequences of FIGURE 10.
  misc_feature (61)..(125): Pfam Name: DnaJ Pfam Description: DnaJ domain
  misc_feature: Functional Homolog Of Ceres CLONE ID no. 31309 at SEQ ID NO. 60
MASTSSLASFSSSSSPFIGSKFSTNQPHSLPFRASFRPFSVSASCASTAERPPSRNATQISLYEVLGIQMGATCQEIKAAYRKLARTLHPDVAANVQKEDTAYEFIKVHEAYETLSDPDKRADYDRSLFRPGRQMSSPFVMSAATMETNVVAAGFPAYTRRRWETDQCW

SEQ ID NO: 79 - DNA, 324 bp, Populus balsamifera subsp. trichocarpa
  misc_feature: Ceres ANNOT ID no.1460661
  misc_feature: Encodes the peptide sequence at SEQ ID NO 80
atggctacaacttcctcattctatgaagtactagggcttccaatgaatactactagccatgaaataaaggctgcttatagaaaactagcaagaacttgccaccctgatgctgtgtctatgcataaaaaagaaatgtcagcctgtgagttcatcaaaatccatgcagcatattcaacattatcggaccctgataaacgtgaaagatatgatagagatctgtatagaaaccgtaggccttttgggtcttcttcagtgaggtcagcaacaatggcagctgcgtccggttataccagtaggaactgggagactgaccagtgttggtag

SEQ ID NO: 80 - protein, 107 aa, Populus balsamifera subsp. trichocarpa
  misc_feature: Ceres ANNOT ID no.1460661
  misc_feature: Bit score of 88.1 for HMM based on sequences of FIGURE 10.
  misc_feature (6)..(70): Pfam Name: DnaJ Pfam Description: DnaJ domain
  misc_feature: Functional Homolog Of Ceres CLONE ID no. 31309 at SEQ ID NO. 60
MATTSSFYEVLGLPMNTTSHEIKAAYRKLARTCHPDAVSMHKKEMSACEFIKIHAAYSTLSDPDKRERYDRDLYRNRRPFGSSSVRSATMAAASGYTSRNWETDQCW

SEQ ID NO: 81 - DNA, 528 bp, Populus balsamifera subsp. trichocarpa
  misc_feature: Ceres ANNOT ID no.1452884
  misc_feature: Encodes the peptide sequence at SEQ ID NO 82
atggccaccacatcttctcttgcatctcttagctcctccatatcccctttcactggctcaaaaacctccaccaatcagcctcatacatcaccatctcgtgtcagcttccgcccttttcgagtacgcgccgcctgcgctaccaccgccgagagacccacatcatacactgcgacaccaacatcagcatcgtctctctacgaagttcttgggattcaaatgggtgccacgtgtacagagatcaagactgcttatcgaagactagcaagagttttgcatcctgatgttgcagctaacggtagaagggaggacaccgcttatgagttcataagagtccatgaagcttacgaaactctgtccgatcctgaaaaacgggcagattatgatcgctccctttacagacgaggaaggcaaatgagctctccgtttgtaatgtccgctgctactgcaacaacaatggcaacaggttatgcagctgctggattttctggctatacaaggcggagatgggaaactgatcagtgctggtag

SEQ ID NO: 82 - protein, 175 aa, Populus balsamifera subsp. trichocarpa
  misc_feature: Ceres ANNOT ID no.1452884
  misc_feature: Bit score of 166.0 for HMM based on sequences of FIGURE 10.
  misc_feature (64)..(128): Pfam Name: DnaJ Pfam Description: DnaJ domain
  misc_feature: Functional Homolog Of Ceres CLONE ID no. 31309 at SEQ ID NO. 60
MATTSSLASLSSSISPFTGSKTSTNQPHTSPSRVSFRPFRVRAACATTAERPTSYTATPTSASSLYEVLGIQMGATCTEIKTAYRRLARVLHPDVAANGRREDTAYEFIRVHEAYETLSDPEKRADYDRSLYRRGRQMSSPFVMSAATATTMATGYAAAGFSGYTRRRWETDQCW

SEQ ID NO: 83 - DNA, 477 bp, Populus balsamifera subsp. trichocarpa
  misc_feature: Ceres ANNOT ID no.1450523
  misc_feature: Encodes the peptide sequence at SEQ ID NO 84
atgcttgcaactcctaccacttcatttctccaaatcaccaccacaaagacaccttgctcaagcccttttagtggcgagtcctatccacttaaacctagagcatcttttactactgcttcacaggccaaaaaatcacaagggagcgttgactcaatggctacaacctcctcattctacgaagtgctagggcttccaatgagtgctagtggccatgaaataaaggctgcttatagaagactagcaagaacttgccaccctgatgttgtgtccatgaatcagaaagaaatgtcatccactgagttcattaaaatccatgcagcatattcaacactgtcagacccagataaacgcgcaagttatgatagagatctttttagaaacagtaggcctttcgggtcttcttctatgaggtcggcaacaatggcagctgcttctggatatactagtaggaactgggagactgaccagtgttggtag

SEQ ID NO: 84 - protein, 158 aa, Populus balsamifera subsp. trichocarpa
  misc_feature: Ceres ANNOT ID no.1450523
  misc_feature: Bit score of 162.0 for HMM based on sequences of FIGURE 10.
  misc_feature (57)..(121): Pfam Name: DnaJ Pfam Description: DnaJ domain
  misc_feature: Functional Homolog Of Ceres CLONE ID no. 31309 at SEQ ID NO. 60
MLATPTTSFLQITTTKTPCSSPFSGESYPLKPRASFTTASQAKKSQGSVDSMATTSSFYEVLGLPMSASGHEIKAAYRRLARTCHPDVVSMNQKEMSSTEFIKIHAAYSTLSDPDKRASYDRDLFRNSRPFGSSSMRSATMAAASGYTSRNWETDQCW

SEQ ID NO: 85 - DNA, 495 bp, Populus balsamifera subsp. trichocarpa
  misc_feature: Ceres ANNOT ID no.1442257
  misc_feature: Encodes the peptide sequence at SEQ ID NO 86
atgtatgccatctcttccacccccgctctaaccaccgccgcaacggccgcggttaccgccaatatagtccaaaaaactttccttccatcgtcgatcacgacatcctccactcgttctctccggggatttcgaatcaaggcctcggtttcaacgtttcctgacactatccgagtagactcgaggaattcatctctgagtctgtacgaaatactccgggtcaatccaaccgcgtcgcaagtggagatcaagactgcgtatagaagtcttgctaaggtataccatcctgatgcgatgttagatcgcgatgatgagccatccgaaggtgttgattttattgagattcacaacgcttatgagacgttatcggatccggcagcgagagcggtttatgatatgtctttatcggcagccgcgagggatttttataggagagcggttggatattcgggtggatattatacgacccgaagatgggaaaccgatcagtgctggtaa

SEQ ID NO: 86 - protein, 164 aa, Populus balsamifera subsp. trichocarpa
  misc_feature: Ceres ANNOT ID no.1442257
  misc_feature: Bit score of 161.8 for HMM based on sequences of FIGURE 10.
  misc_feature (66)..(131): Pfam Name: DnaJ Pfam Description: DnaJ domain
  misc_feature: Functional Homolog Of Ceres CLONE ID no. 31309 at SEQ ID NO. 60
MYAISSTPALTTAATAAVTANIVQKTFLPSSITTSSTRSLRGFRIKASVSTFPDTIRVDSRNSSLSLYEILRVNPTASQVEIKTAYRSLAKVYHPDAMLDRDDEPSEGVDFIEIHNAYETLSDPAARAVYDMSLSAAARDFYRRAVGYSGGYYTTRRWETDQCW

SEQ ID NO: 87 - DNA, 420 bp, Populus balsamifera subsp. trichocarpa
  misc_feature: Ceres ANNOT ID no.1541121
  misc_feature: Encodes the peptide sequence at SEQ ID NO 88
atgctctctccctgcctctccacttctgctcctccacgtgtaacattcaagcgaccgttagtaacgaacagcaccaccaccactctcccgccgcgaaatctgtctctgaagaaacctcaaggcatggcctcatctttgtacgagattctaaggattccggtgggggcaacaaaccaggagatcaagactgcttaccggagactggccaggacttaccaccctgacgtggttgccgaggaccggaaagacacatctgctgacgagtttatgaagttacacgctgcctattcaactctatcagacccggaaaagcgggctgtttatgatagtaagctatttataaggaagcagcggccattgaccaccgtggggttttcgggctatagtggccggacatgggaaactgatcagtgttggtag

SEQ ID NO: 88 - protein, 139 aa, Populus balsamifera subsp. trichocarpa
  misc_feature: Ceres ANNOT ID no.1541121
  misc_feature: Bit score of 200.0 for HMM based on sequences of FIGURE 10.
  misc_feature (45)..(109): Pfam Name: DnaJ Pfam Description: DnaJ domain
  misc_feature: Functional Homolog Of Ceres CLONE ID no. 31309 at SEQ ID NO. 60
MLSPCLSTSAPPRVTFKRPLVTNSTTTTLPPRNLSLKKPQGMASSLYEILRIPVGATNQEIKTAYRRLARTYHPDVVAEDRKDTSADEFMKLHAAYSTLSDPEKRAVYDSKLFIRKQRPLTTVGFSGYSGRTWETDQCW

SEQ ID NO: 89 - DNA, 516 bp, Populus balsamifera subsp. trichocarpa
  misc_feature: Ceres ANNOT ID no.1480481
  misc_feature: Encodes the peptide sequence at SEQ ID NO 90
atgtacactacgttcgctccctcccctctaaccgctgtgacctccgtaatcaccgccgcggcaacctcgaacacagttcaaaagcctatccttttatcaccggttaaaacaaccgccggtcgttcttgtcgggggtttcaaatcaaagcctcggtctcaacgtttcctgactcgacccgagtcgactcaaggtattcaacgctgagtctgtacgatgtactccgggtgaatccagctgcgtcgcaagtggagatcaagtcagcgtacaggagtcttgcgaagatttaccatcctgatgcttttttgagtcatgatcgtgatcatgatgacgagcaatcggacggtggagattttatcgagattcatagtgcttatgagacgttatccgatccgactgctagagcggtttatgacctgtctttatcggcagcggcgaggtgtttttacaggagagcggccgggtattcgggcggggattatacgacccgaagatgggaaacagatcagtgctggtaa

SEQ ID NO: 90 - protein, 171 aa, Populus balsamifera subsp. trichocarpa
  misc_feature: Ceres ANNOT ID no.1480481
  misc_feature: Bit score of 138.1 for HMM based on sequences of FIGURE 10.
  misc_feature (69)..(138): Pfam Name: DnaJ Pfam Description: DnaJ domain
  misc_feature: Functional Homolog Of Ceres CLONE ID no. 31309 at SEQ ID NO. 60
MYTTFAPSPLTAVTSVITAAATSNTVQKPILLSPVKTTAGRSCRGFQIKASVSTFPDSTRVDSRYSTLSLYDVLRVNPAASQVEIKSAYRSLAKIYHPDAFLSHDRDHDDEQSDGGDFIEIHSAYETLSDPTARAVYDLSLSAAARCFYRRAAGYSGGDYTTRRWETDQCW

SEQ ID NO: 91 - DNA, 639 bp, Populus balsamifera subsp. trichocarpa
  misc_feature: Ceres ANNOT ID no.1487713
  misc_feature: Encodes the peptide sequence at SEQ ID NO 92
atgctctctccctgcctctccacttctgctcctccacgtgtaacattcaagcgaccgttagtaacgaacagcaccaccaccactctcccgccgcgaaatctgtctctgaagaaacctcaaggcatggcctcatctttgtacgagattctaaggattccggtgggggcaacaaaccaggagatcaagactgcttaccggagactggccaggacttaccaccctgacgtggttgccgaggaccggaaagacacatctgctgacgagtttatgaagttacacgctgcctattcaactctatcagacccggaaaagcgggctgtttatgatagtaagctatttataaggaagcagcggccattgaccaccgtggggttttcgggctatagtggccggacatgggaaactgatcagtgttgcttctcttctcctctgcgcagcagttctcttcttgacaaaagagaagagattgaaggcatctgggcaatcgttatttccaaagtaagaggaattggaggtagctccagcagaaaagcaaaaatggaaagtgacccagcccagtggagggcaagtttttctttagaaaacgacatagcaaacttgaatgttcgtgagcttgatcccacactgcaccttgagtaa

SEQ ID NO: 92 - protein, 212 aa, Populus balsamifera subsp. trichocarpa
  misc_feature: Ceres ANNOT ID no.1487713
  misc_feature: Bit score of 189.7 for HMM based on sequences of FIGURE 10.
  misc_feature (45)..(109): Pfam Name: DnaJ Pfam Description: DnaJ domain
  misc_feature: Functional Homolog Of Ceres CLONE ID no. 31309 at SEQ ID NO. 60
MLSPCLSTSAPPRVTFKRPLVTNSTTTTLPPRNLSLKKPQGMASSLYEILRIPVGATNQEIKTAYRRLARTYHPDVVAEDRKDTSADEFMKLHAAYSTLSDPEKRAVYDSKLFIRKQRPLTTVGFSGYSGRTWETDQCCFSSPLRSSSLLDKREEIEGIWAIVISKVRGIGGSSSRKAKMESDPAQWRASFSLENDIANLNVRELDPTLHLE

SEQ ID NO: 93 - DNA, 429 bp, Populus balsamifera subsp. trichocarpa
  misc_feature: Ceres ANNOT ID no.1456204
  misc_feature: Encodes the peptide sequence at SEQ ID NO 94
atgaatgcaacaacactattcaccgtctccccactcctttcatcgctggcgaaccgccggggagtctcaattaaagccgccgtgtcaacattagcggccgagtctttccgagttgacccagggaggaagtcgctgagtctgtacgagattcttcaagttaagagaacggcgtcgttaacggagattaagggtgcgtttaggagtctagccaaggtttatcatcctgatgtgagcggtagtgatggtggagagcaattggacggtctggattttgttgagatatgtaatgcctatgaaacgctgtcggatcccgctgctcgtgctatgtatgatttgtcgttgggttacagtagtagcaggaagagaccggttaggttttccggtgggtattctctgaaccggcggtgggaaactgatcagtgctggtaa

SEQ ID NO: 94 - protein, 142 aa, Populus balsamifera subsp. trichocarpa
  misc_feature: Ceres ANNOT ID no.1456204
  misc_feature: Bit score of 133.6 for HMM based on sequences of FIGURE 10.
  misc_feature (46)..(111): Pfam Name: DnaJ Pfam Description: DnaJ domain
  misc_feature: Functional Homolog Of Ceres CLONE ID no. 31309 at SEQ ID NO. 60
MNATTLFTVSPLLSSLANRRGVSIKAAVSTLAAESFRVDPGRKSLSLYEILQVKRTASLTEIKGAFRSLAKVYHPDVSGSDGGEQLDGLDFVEICNAYETLSDPAARAMYDLSLGYSSSRKRPVRFSGGYSLNRRWETDQCW

SEQ ID NO: 95 - DNA, 624 bp, Brassica napus
  misc_feature: Ceres Clone ID no. 964616
  misc_feature: Encodes the peptide sequence at SEQ ID NO. 746
aattctcctgtcgttgtttcctttcaagaaaaagagagagagagagagagaggaaataacgtccgtttgaagatccaaatctcggcaatgtcgacgttctcgccatcgttggccgtcctctctctgattcttctgagcctctctctggtttcatcgacggagattaacaagggaggagagattcgattaccttccgagaagaccaacggtgaattctgcgggaaaacgtctaaaccggcttcgtgtccggttaagtgttttagggctgatccggtttgcggagaagacggcgttacgtactggtgcggttgtgcagatgctctgtgccacggcgttcgtgtctctaaacctggagcttgtgatgttggtaatggcgttgggttgtctgttcctggacaagctctgcttttgatccacattgtctggatgatggctcttgggttttcgatcctctttggcctcttctgattttttttttttgttggggattaagaagatagagattggtaggttttgaggttgcaaccactgaatctttttgttgataatcattgatataaaatgttgagttttatttcctaattgatgtgcagaaaaaaaaaatgatatgtattgatatattac

SEQ ID NO: 96 - protein, 360 aa, Populus balsamifera subsp. trichocarpa
  misc_feature: Ceres ANNOT ID no.1473094
  misc_feature: Bit score of 473.5 for HMM based on sequences of FIGURE 9.
  misc_feature (71)..(329): Pfam Name: Trehalose_PPase Pfam Description: Trehalose-phosphatase
  misc_feature: Functional Homolog Of Ceres SEEDLINE ID no. ME20095 at SEQ ID NO. 1129
MGFQRSSYWQKVQPGSDLSTKETAPNSSHPVTNEAVSDDADYSSWMVDHPSALTSFDQMMKDAKGKKIVVFLDYDGTLSPIVNDPDRAFMSDEMRAAVREVAKYFPTAIISGRSRDKFMRQSLRMSMVSFVQVKGFVQLNNIYYAGSHGMDIMAPPRPARSSDGKYHTVSLDRKGNDAVFQPAQKFLPAIQKILKELEEAIMKIPGARVENNRFCASVHFRQVREEDYGTLEEKVKSILKHYPDFRLGWGKKVMEIRPSIEWDKGNALEYLLDTLGLGNCTDVLPLYIGDDITDEDAFKVIQKRGQGCPIVVTSSPKDTKASYSLYEPSEVLTFLLRLARWRKSSSSSRSVLSQVWGVSG

SEQ ID NO: 97 - DNA, 1025 bp, Gossypium hirsutum
  misc_feature: Ceres CLONE ID no.1939845
  misc_feature: Encodes the peptide sequence at SEQ ID NO 98
gaaacaaaggtattccataatccaaaagcgcgtaccatgctctcttcccttcccatctcaaattctatctccctttcctcaatttctcctccgtcagcttcccgtatccgattccgaccacctctcgccgccgcatccaccgcctattttacttcaaaacaacaaaaagcttcgcccagcggttaccttagccgtccaggaatggcagcgtgcacttcgttgtacgaggtgctagggatttctgtcggcgcttcgaaccaggaaatcaaggcggcgtaccgccgattggcaagggtttgccaccccgatgtggtgacaatcgatcggaaagactcatcggccgacgaattcatgaagatccatgcggcctacagtaccttatcggatcccgataaacgagccgtatatgatagtaagcttatctggagatgccaacggccgttgacttcggcttctatgttttctggttataccgggaggagttgggagaccgatcagtgttggtaaattagttgactcactccatctgcctaccgagttggaggttgaactcatcaacgtttcttataaatctgtacagttagattatatcccagcaaaaaaaaaaaaactgattgactaacgaaaaagaaaggaaaaagcaaagagtggtgggccgtgggttttggtggagaaatcagaggcgttgatagtggtacgtaagagctctgctctttttttgccctgtgcccggcatctacaaaagatggacccttccattgtactttcagtactatttcacggtgattaaaatcataaatacaaaataaaaatgacaaataacttgttgttaagctgaatttatattattagctgtgatattgtgcggtgaagtttctattccgagttgacaaatggaaaggaaaattttatccaaatcaacttttttcctctcatcatttttctttttgtatctcaagaaacaaaatttgctgaattaatattcttataccagttgattaagataaaaaaaaaaaaaaaaaaaa

SEQ ID NO: 98 - protein, 156 aa, Gossypium hirsutum
  misc_feature: Ceres CLONE ID no.1939845
  misc_feature: Bit score of 359.9 for HMM based on sequences of FIGURE 10.
  misc_feature (61)..(125): Pfam Name: DnaJ Pfam Description: DnaJ domain
  misc_feature: Functional Homolog Of Ceres CLONE ID no. 31309 at SEQ ID NO. 60
MLSSLPISNSISLSSISPPSASRIRFRPPLAAASTAYFTSKQQKASPSGYLSRPGMAACTSLYEVLGISVGASNQEIKAAYRRLARVCHPDVVTIDRKDSSADEFMKIHAAYSTLSDPDKRAVYDSKLIWRCQRPLTSASMFSGYTGRSWETDQCW

SEQ ID NO: 99 - DNA, 754 bp, Zea mays
  misc_feature: Ceres CLONE ID no.1387402
  misc_feature: Encodes the peptide sequence at SEQ ID NO 100
atatctaaatcctctttctctctgcttcttcaaattttacagtttctttctaaagctgccctcgaattttacattaattacataaatgtccggaatcttagttaattctgccgctaactccctccgcttctcgccgggagctagccttcctcatccgaagccaaccagatcacacaacggcagcgcgcggttccccaccggagccaactcgttcagagcttccgcgcagactctcaacgcggagccaaccgtaacggaatccgttcgccggcgagcgtcgagcctctacgatctgctgaaagtcaacgaaacggcgtccttgccggagatcaagacggcgtaccggagcctagctaaagtctaccatcccgacgcgtcggagtcggacgggcgagatttcatggagatccacaaagcttacgcgacgctcgcggatccgacgacgagagcgatctacgattcgacgctgggagcgcgacggagacgtgtgcaggtcggggcgatgggtcgggcgggtcgggtgtattcgacgacccggagatgggagacggatcagtgttggtgatttaggtttcaggtgatgatgactttgcagcaagggcacttttttttacttcatttttccccttttgttacttttttttttttccttttgtcgtgtattgggaaaattaaggggaaagataagttttatcagtccttagctttaactttgttaacataaattatgaatagagagatgtatattattttt

SEQ ID NO: 100 - protein, 159 aa, Zea mays
  misc_feature: Ceres CLONE ID no.1387402
  misc_feature: Bit score of 351.3 for HMM based on sequences of FIGURE 10.
  misc_feature (66)..(125): Pfam Name: DnaJ Pfam Description: DnaJ domain
  misc_feature: Functional Homolog Of Ceres CLONE ID no. 31309 at SEQ ID NO. 60
MSGILVNSAANSLRFSPGASLPHPKPTRSHNGSARFPTGANSFRASAQTLNAEPTVTESVRRRASSLYDLLKVNETASLPEIKTAYRSLAKVYHPDASESDGRDFMEIHKAYATLADPTTRAIYDSTLGARRRRVQVGAMGRAGRVYSTTRRWETDQCW

SEQ ID NO: 101 - DNA, 659 bp, Panicum virgatum
  misc_feature: Ceres CLONE ID no.2015383
  misc_feature: Encodes the peptide sequence at SEQ ID NO 102
aacccacctctcacaaaatctctctctcacccaaggctcggccaatcccgatccctccctccccgtcccgccactccaccgccagcgccagcatgatctccccgcgccccgcgatgtcgcccagcttcctcgccttccggccgggctccccggccgcgtccccgccgccctccccgcgcctcaacgggccgccgcccctctccgcgtccttctccgcctccacggccgtcaccgccccggaccacgcggcggccgccagctcctccttctacgacgtcctcggcctccgcccgggcgccagcccgcgcgagatcaagaccgcgtaccgccgcctggcgctcgccgtccacccggacgccgccccgcacccggcctcctcctccgccgaggacttcatccgcgtccacgccgcctactccacgctctccgaccccgacaagcgcgccgactacgaccgccgcctcctcctctccgccgggcgccgccgcgcgcacccggcggcgctcggccgctcgccctccttcccggcgcgccgctcccgccgcacctgggagaccgaccagtgctggtgacagcgtaaagatcttccgcgcctgcggctgtggcggcccctcgctgtccccgtcgggccgcggaaccttcccatttgaatggagcct

SEQ ID NO: 102 - protein, 159 aa, Panicum virgatum
  misc_feature: Ceres CLONE ID no.2015383
  misc_feature: Bit score of 348.3 for HMM based on sequences of FIGURE 10.
  misc_feature (58)..(121): Pfam Name: DnaJ Pfam Description: DnaJ domain
  misc_feature: Functional Homolog Of Ceres CLONE ID no. 31309 at SEQ ID NO. 60
MISPRPAMSPSFLAFRPGSPAASPPPSPRLNGPPPLSASFSASTAVTAPDHAAAASSSFYDVLGLRPGASPREIKTAYRRLALAVHPDAAPHPASSSAEDFIRVHAAYSTLSDPDKRADYDRRLLLSAGRRRAHPAALGRSPSFPARRSRRTWETDQCW

SEQ ID NO: 103 - DNA, 689 bp, Parthenium argentatum
  misc_feature: Ceres CLONE ID no.1607893
  misc_feature: Encodes the peptide sequence at SEQ ID NO 104
  misc_feature (543)..(543): n is a, c, t, g, unknown, or other
  misc_feature (544)..(544): n is a, c, t, g, unknown, or other
  misc_feature (545)..(545): n is a, c, t, g, unknown, or other
  misc_feature (607)..(607): n is a, c, t, g, unknown, or other
  misc_feature (608)..(608): n is a, c, t, g, unknown, or other
  misc_feature (609)..(609): n is a, c, t, g, unknown, or other
atccacttcatctcaccactcaaaaacattccttaaaaacatttcacaaacatattttcctcaaacaaaaaatggctttttcatcttctagttctccttgcttcttcccttcccataatttaaccaacttaagatacaataaacataattcacctatgatctcagccagtttcgccacatccgagaggccgggaacagcccgatccactcgggctactccttcgtcactatacgaagtgctcgggatacaaataggagccgatacgatggaaatcaagtcggcataccgtagattggcaagagttgtgcatccggacgtgggaaaccttaattcgtccgcggacgagtttatgaaagtgcattcggcttacgctacgttatcggatccaggaaagcgagccgattatgatcggagtttgtttgtgagaccggaaatggttggccggagttgttctccggtgggttatagtggtcggagatgggagacagatcagtgttggtagtatgtggtgggtctgcacgtgtatatgtagttttttgttnnntagtatggatggcaacgggtcgggtatgggccgggtttggctaatcccatacccataccctnnnatgaaatctcatcacatacccgccccatttacccgtcgggtttatgtcgggtattacccgtcgggtatagagcatacccg

SEQ ID NO: 104 - protein, 143 aa, Parthenium argentatum
  misc_feature: Ceres CLONE ID no.1607893
  misc_feature: Bit score of 337.6 for HMM based on sequences of FIGURE 10.
  misc_feature (52)..(113): Pfam Name: DnaJ Pfam Description: DnaJ domain
  misc_feature: Functional Homolog Of Ceres CLONE ID no. 31309 at SEQ ID NO. 60
MAFSSSSSPCFFPSHNLTNLRYNKHNSPMISASFATSERPGTARSTRATPSSLYEVLGIQIGADTMEIKSAYRRLARVVHPDVGNLNSSADEFMKVHSAYATLSDPGKRADYDRSLFVRPEMVGRSCSPVGYSGRRWETDQCW

SEQ ID NO: 105 - DNA, 505 bp, Brassica napus
  misc_feature: Ceres CLONE ID no.972919
  misc_feature: Encodes the peptide sequence at SEQ ID NO 106
cctcttgtgtgattcatatctgcttctcagacgaactctctctgcttaatccaaattttaacgcgttctttcgaatttgcccctccaattttaatttaattacgtaaatgtccggaactctaatctacttaggcgttaactcccttcgatcctcgccgggaaatagccttcgtcaaccgaagccaaccagactccacaacggaaacgcgcggctctccaccggagctacgtcgtttagagcttcggcagcgcagactctcaacgccgaaccagccgtaacggaatccgttcgccggcgagcgtcgaacctctacgaactgctgagagtggacgaaacggcgtcgttgacggagattaagacggcgtaccggagcttagctaaggttcaccatccggacgcgtcgtcggaatcggacggacgagatttcatggagattcacaaagcttacgcgacgctggcggatccgacgacgagagcgatctacgattcgacgctgggagcaag

SEQ ID NO: 106 - protein, 132 aa, Brassica napus
  misc_feature: Ceres CLONE ID no.972919
  misc_feature: Bit score of 250.6 for HMM based on sequences of FIGURE 10.
  misc_feature (67)..(127): Pfam Name: DnaJ Pfam Description: DnaJ domain
  misc_feature: Functional Homolog Of Ceres CLONE ID no. 31309 at SEQ ID NO. 60
MSGTLIYLGVNSLRSSPGNSLRQPKPTRLHNGNARLSTGATSFRASAAQTLNAEPAVTESVRRRASNLYELLRVDETASLTEIKTAYRSLAKVHHPDASSESDGRDFMEIHKAYATLADPTTRAIYDSTLGA

SEQ ID NO: 107 - DNA, 622 bp, Glycine max
  misc_feature: Ceres CLONE ID no.1645860
  misc_feature: Encodes the peptide sequence at SEQ ID NO 108
aacattccattcccaatttccatatcccaacggatcgcaatatagcaagtagcgaacatgatttcttccgtgtcctttccagcgtctcttcccgccgttaacttctccggcaacgccgtggcttctccgtcgtgccgcgtcaaatccaggcctatagttgccttcgccaccgccaccgccaccgcggaagctcgctcttcctggacggagcaaccgagaccttcgtatctgaactcctcttgctcttcgctctacgaggttctcggcatccccgccggcgcctctaaccaagaaatcaaggcggcgtaccggcgactggccagagtcttccaccccgacgtggcggcgattgaccggaaaaactcatccgccgatgagttcatgaagatccacgctgcgtactctactctctcggatcccgacaagcgcgccaactacgatcagaggctcttccggcgacaacggccgttgtcgacggcggcggtgttctccggttatacgcgtcggaactgggaaacggatcagtgttggtagtgagtcactgagtcgactcgctcgagtgaatgggaaaagacgcggttgttgaagcgcctttccttgcatatagtaaaaataatcacta

SEQ ID NO: 108 - protein, 158 aa, Glycine max
  misc_feature: Ceres CLONE ID no.1645860
  misc_feature: Bit score of 211.3 for HMM based on sequences of FIGURE 10.
  misc_feature (64)..(128): Pfam Name: DnaJ Pfam Description: DnaJ domain
  misc_feature: Functional Homolog Of Ceres CLONE ID no. 31309 at SEQ ID NO. 60
MISSVSFPASLPAVNFSGNAVASPSCRVKSRPIVAFATATATAEARSSWTEQPRPSYLNSSCSSLYEVLGIPAGASNQEIKAAYRRLARVFHPDVAAIDRKNSSADEFMKIHAAYSTLSDPDKRANYDQRLFRRQRPLSTAAVFSGYTRRNWETDQCW

SEQ ID NO: 109 - DNA, 809 bp, Glycine max
  misc_feature: Ceres CLONE ID no.1042804
  misc_feature: Encodes the peptide sequence at SEQ ID NO 110
attccttcccaatttctcccacgacaacgtatcacaagctcccaatatagcaagcagcaaacatgatttcttccgtgtcctttccagcgtctcttcccgccgttaacttctccggcaacgccatggcttcgccgtcgtgccgcgtcaaatcccggccaatagtcgccttcgccaccgccactgccaccgctgaagctcgctcttcctggacggagcaaccgagaccttcctatctgaactcctcttgctcttcgctttacgatatcctcggcatccccgctggcgcctctaaccaagaaatcaaggccgcgtaccggcgactagccagagtctgccaccccgacgtggcggccatcgaccggaaaaattcgtccgctgacgaattcatgaagatccacgccgcgtactctactctttctgatcccgacaagcgcgctaactacgatcggagcctattccggcgacaacggccgttgtcgacggcggcggtgttytccggttacacgsgtcggaactgggaaacggatcagtgctggtagtgagtcmctgagtcgactcgctcgagtgaatgaragaagacscggttattgaagcscctttytttgcatataagtaattaatcmctagttagttagtcgttaragtttgtatgatactacgtatatgtatagctacatacatacatatacgsgtagagtagaatagactgccmcttgtactgagkactyttgtaawataaacttttcatcaaaaattttatggatgaaaaagaaaaaaaaaaaaacagaaaagaaaattgactttggtat

SEQ ID NO: 110 - protein, 158 aa, Glycine max
  misc_feature: Ceres CLONE ID no.1042804
  misc_feature: Bit score of 209.5 for HMM based on sequences of FIGURE 10.
  misc_feature (64)..(128): Pfam Name: DnaJ Pfam Description: DnaJ domain
  misc_feature: Functional Homolog Of Ceres CLONE ID no. 31309 at SEQ ID NO. 60
  misc_feature (144)..(144): Xaa is any aa, unknown, or other
  misc_feature (149)..(149): Xaa is any aa, unknown, or other
MISSVSFPASLPAVNFSGNAMASPSCRVKSRPIVAFATATATAEARSSWTEQPRPSYLNSSCSSLYDILGIPAGASNQEIKAAYRRLARVCHPDVAAIDRKNSSADEFMKIHAAYSTLSDPDKRANYDRSLFRRQRPLSTAAVXSGYTXRNWETDQCW

SEQ ID NO: 111 - DNA, 645 bp, Parthenium argentatum
  misc_feature: Ceres CLONE ID no.1606678
  misc_feature: Encodes the peptide sequence at SEQ ID NO 112
atccactccaaaacccacacaaaatcatttattcacacattcaccccaaaacgatgtcgttttcatcatcttcttcttcttcctgtttcttcactccccctaatttcaccgtcaataaaccatctccgtcaaccaacgtccgttacagaaaccataattcactatacgatgtgctcggagtacaaattggggcagatacggtggagataaaggcggcgtaccggagattagcgagagtgttgcatccggacgtcggaactagggattcgtcggcggatgagtttatgaaagtgcattctgcgtacgctacgttgtcggatccaggaaaacgagcggattatgatcggagtttgttccttagacagagagtggttggccggagttcgtctccggtgggatatggtggttatagtggccggagatgggagacggaccagtgttggtagttgtttgtacggtggattggtttctagtgtacatatctgtagctaaaagtttaggttaaaaagttgaaaggtataaatatgatgtgtaaattagtaaatggttatattttttataaaccaagttattactgaatatattgtagatttgtggatcaaagcattttttttttttgattgatgcaatggggtgactttatct

SEQ ID NO: 112 - protein, 130 aa, Parthenium argentatum
  misc_feature: Ceres CLONE ID no.1606678
  misc_feature: Bit score of 209.5 for HMM based on sequences of FIGURE 10.
  misc_feature (36)..(97): Pfam Name: DnaJ Pfam Description: DnaJ domain
  misc_feature: Functional Homolog Of Ceres CLONE ID no. 31309 at SEQ ID NO. 60
MSFSSSSSSSCFFTPPNFTVNKPSPSTNVRYRNHNSLYDVLGVQIGADTVEIKAAYRRLARVLHPDVGTRDSSADEFMKVHSAYATLSDPGKRADYDRSLFLRQRVVGRSSSPVGYGGYSGRRWETDQCW

SEQ ID NO: 113 - DNA, 886 bp, Triticum aestivum
  misc_feature: Ceres CLONE ID no.684496
  misc_feature: Encodes the peptide sequence at SEQ ID NO 114
ctgattggtgattgcctcctcgtccggcgttaaaaagcagcctcggctcctccgcgcatccgaaccgagcctcgccaccatgatctccccgcgccccactctctcctccggcttcttctcccgctccgcctccttctcccgccccggctcattctccccctcgccgcctgcctcgccggccgcgcaggcgccgccgcggctgctctcggccccgttcgcgcgccacgccaccttctcccgctccgcctccgccgtcgccgcgccgggccgcggcgcctcctcctgcttgtacgacgtgctcggcctcgacgccggcgcgagcgacggggagatcaaggccgcgtaccgccgcctggcgcgcgccgtccacccggacgtgtccccgcaccccgccgcgtccgccgacgacttcatacgggtgcacgccgcctacagcacgctctccgaccccagcaagcgcgccgactacgaccgccgcatgatcatgatcccctccgccgtcggccgccgcagcgcccccaacctcgcccgctcgccgtcgttccccgggtgctgccgccgcacctgggagaccgaccagtgctggtgatcgacgttttcggccggagtggcctccggctggttccccgggcggttagaaatgcaaaggttaccgcggccactaggctcacttgcagtggtggccgggtcactgcgcttctagaataaacagtagtagtacgtactctgttattagcgcaacgtacaattagtctcacacttcgctgtggcttgtatagaaaacaaaagatcgatgtatggcgtcgtgtgtgacgtccgtctattttgaagtttatcatgcatgttcggcttgatgtggtgatctgacagtaggatttgttaaatc

SEQ ID NO: 114 - protein, 169 aa, Triticum aestivum
  misc_feature: Ceres CLONE ID no.684496
  misc_feature: Bit score of 181.8 for HMM based on sequences of FIGURE 10.
  misc_feature (69)..(131): Pfam Name: DnaJ Pfam Description: DnaJ domain
  misc_feature: Functional Homolog Of Ceres CLONE ID no. 31309 at SEQ ID NO. 60
MISPRPTLSSGFFSRSASFSRPGSFSPSPPASPAAQAPPRLLSAPFARHATFSRSASAVAAPGRGASSCLYDVLGLDAGASDGEIKAAYRRLARAVHPDVSPHPAASADDFIRVHAAYSTLSDPSKRADYDRRMIMIPSAVGRRSAPNLARSPSFPGCCRRTWETDQCW

SEQ ID NO: 115 - DNA, 856 bp, Zea mays
  misc_feature: Ceres CLONE ID no.1062366
  misc_feature: Encodes the peptide sequence at SEQ ID NO 116
atctctcttcatttccctctctcgaacaagaagacaacaactcaaaacgcagagaagatctccagaacgacaccgtttcgtagcaaagatgctttcttcgtctccaacctccttcactcatccattcctctccacgtctccgcctctctcccccatatctccgccgtctcgctcacctcgcctcccgcctcctctcgtctccgcctcttgctcctacacctgcacggaggatccgccgaggctgcaccagatcccgcggcgaacgacgccggcgaacgcttcgctctacgagattctagaggttcctcgcggcgcgacgagccaggatatcaaatcggcttaccggaggttggctaggatctgccaccccgacgtggcggcgggaaccgatcggagtaactcttcggcggatgagttcatgaagatccacgcggcgtactgtacgctctctgatcctgacaaacgctctgtttacgatcggaggatgcttcgtcggagccgtccgttgaccgtcagcacctccgggatgggcagttacgttggacggaactgggaaaccgatcagtgctggtagcgagttgactcggtgaccgagttagctcgagttaattcgaattaataaaacacggttgtaaaaataggaagcgataaaagctggggttagcgatgtaattaacagtagtattagtgtgctaacatacgccaagagctaaacgtacgctccctctccctgcccacggccacgggcgatcagcgccgtttgcatcgtgttacgtaggatctacgtgtgttttttttttaccttctgaatcctgtaatacttatcaatgaaaacaaaataaacactgttataatt

SEQ ID NO: 116 - protein, 161 aa, Zea mays
  misc_feature: Ceres CLONE ID no.1062366
  misc_feature: Bit score of 168.8 for HMM based on sequences of FIGURE 10.
  misc_feature (65)..(130): Pfam Name: DnaJ Pfam Description: DnaJ domain
  misc_feature: Functional Homolog Of Ceres CLONE ID no. 31309 at SEQ ID NO. 60
MLSSSPTSFTHPFLSTSPPLSPISPPSRSPRLPPPLVSASCSYTCTEDPPRLHQIPRRTTPANASLYEILEVPRGATSQDIKSAYRRLARICHPDVAAGTDRSNSSADEFMKIHAAYCTLSDPDKRSVYDRRMLRRSRPLTVSTSGMGSYVGRNWETDQCW

SEQ ID NO: 117 - DNA, 564 bp, Musa acuminata
  misc_feature: Ceres CLONE ID no.1722931
  misc_feature: Encodes the peptide sequence at SEQ ID NO 118
acccaactcggaatctatctcgtccatgatatcgtcgctgtgcctcgcttcccccaaatccttcctccgccccccgcgctgcgtcgccgcctccgccgccgcagcccctcctgccgtctgctcgtccgtgacgctatacgacgtgctcggcatcgccgccggcgcatccggccgcgagatcaaggcggcgtaccggaggcttgcccttgcgtgccacccggacgtggccgcggtcgagcggaggggcgcgtccgcggtcgagttcatgcgggtccacgcggcttacgagactctctctgatccggagaagcgcgccgactacgaccgcagcgtcatgacagcggtggacgccggccgacggtgggcgcccttccgctcgcagtggacgtcgtcgcactccaccggtcgccgccgtcctcgcacgtgggagacggaccagtgctggtagcactcggaccgatccaccacatcagtgtacagattttgagggatgttttacatcaatttcccttggttagatttgtataagaaaatcgaagtcatacataggcgtccccatttttc

SEQ ID NO: 118 - protein, 148 aa, Musa acuminata
  misc_feature: Ceres CLONE ID no.1722931
  misc_feature: Bit score of 137.8 for HMM based on sequences of FIGURE 10.
  misc_feature (44)..(108): Pfam Name: DnaJ Pfam Description: DnaJ domain
  misc_feature: Functional Homolog Of Ceres CLONE ID no. 31309 at SEQ ID NO. 60
PNSESISSMISSLCLASPKSFLRPPRCVAASAAAAPPAVCSSVTLYDVLGIAAGASGREIKAAYRRLALACHPDVAAVERRGASAVEFMRVHAAYETLSDPEKRADYDRSVMTAVDAGRRWAPFRSQWTSSHSTGRRRPRTWETDQCW

SEQ ID NO: 119 - DNA, 758 bp, Glycine max
  misc_feature: Ceres CLONE ID no.746169
  misc_feature: Encodes the peptide sequence at SEQ ID NO 120
acccaaacacggttctaacatatctcattccaatttcgcccctcgccggaaaaagaaaacctcaccgcaacgttcgattcagtttccgatggcgccagcgctgaacctcgccgccggaggaattccgctgagtttctcttcctccgtcgaccgctccgccagctttccacggcggtcctcggtccgcgccgtcgcggctgaggcggtggatacgcagcggccggcggcgagcctttacgaggtgctgcgagtcgagcgagacgcatcgccgacggagatcaagtcggcgtaccggagcctcgcgaagctctaccatcccgatgcggcggtgcagaggtcaccggagactgacggcgacggagacttcattcagctccgaaacgcgtacgagacgctgtcggatccgtcggcgagggcgatgtacgataggacgctggcggcggcgcacggcggaagacaccgccggttttctacttcgcttagtcggaaccactcgtcggcgttttacacgacgcgaaggtgggaaacggaccaatgctggtagaggaattagcaaagaaaaatgtggatttgttaacaagaaagaggaatcgccgaatcggtgaaaacgatgtcaaaaagagtgatgagaatcggaaattactaacttagatggatagagcaaacaaagagagagagagagagaggatgaagaagcaaattttgcttctctttttgtgagaatgtaaatgattttttttttaaaaaaaaaaaaaaaa

SEQ ID NO: 120 - protein, 151 aa, Glycine max
  misc_feature: Ceres CLONE ID no.746169
  misc_feature: Bit score of 136.6 for HMM based on sequences of FIGURE 10.
  misc_feature (48)..(113): Pfam Name: DnaJ Pfam Description: DnaJ domain
  misc_feature: Functional Homolog Of Ceres CLONE ID no. 31309 at SEQ ID NO. 60
MAPALNLAAGGIPLSFSSSVDRSASFPRRSSVRAVAAEAVDTQRPAASLYEVLRVERDASPTEIKSAYRSLAKLYHPDAAVQRSPETDGDGDFIQLRNAYETLSDPSARAMYDRTLAAAHGGRHRRFSTSLSRNHSSAFYTTRRWETDQCW

SEQ ID NO: 121 - DNA, 602 bp, Glycine max
  misc_feature: Ceres CLONE ID no.1050475
  misc_feature: Encodes the peptide sequence at SEQ ID NO 122
aaaataattcccaagcctcaacttctaacaacgacgtcgtcgcgtatggtgcccaaacatactcacagcatctttccctacactgaccaccgctttctccaccaaaggagtctcctcgccgccgcgccacgtcagattccggtcagcttcgtatccgtgccctcacgggatggcttcgagcgcgacgctctaccagattctgggagtccgcgccgtcgcatccggcgaggaaatcaaggcggcgtaccggcggctggcgagggtttgccaccctgacgtggtgccgttggagcgaagggattcctctgcggcagagtttatgaagatccacgccgcataccgcacgctatcggatcctgagaagcgggccagttatgatagaagcttgttccggcggcgccagcggacgctaacaatgtctccgtcggggtattgtggctatggtggtcggaactgggaaacggaccaatgttggtagcgagttgactagtgagtccacaaattggatctagggtgtacttatttaatgctttagagtctttatgtaagcagtaatttttatttcttttacttgcaaaaaggatagacaatagttgaaagac

SEQ ID NO: 122 - protein, 102 aa, Glycine max
  misc_feature: Ceres CLONE ID no.1050475
  misc_feature: Bit score of 125.9 for HMM based on sequences of FIGURE 10.
  misc_feature (6)..(70): Pfam Name: DnaJ Pfam Description: DnaJ domain
  misc_feature: Functional Homolog Of Ceres CLONE ID no. 31309 at SEQ ID NO. 60
MASSATLYQILGVRAVASGEEIKAAYRRLARVCHPDVVPLERRDSSAAEFMKIHAAYRTLSDPEKRASYDRSLFRRRQRTLTMSPSGYCGYGGRNWETDQCW

SEQ ID NO: 123 - DNA, 682 bp, Musa acuminata
  misc_feature: Ceres CLONE ID no.1728904
  misc_feature: Encodes the peptide sequence at SEQ ID NO 124
attcttcaacctcgtttagttgattctgtggctgtgagtcgatgatatcttcaccctctctcgccgctcccagatcccacctccgcttcccaccccgcctgccctcgtcctcctcctgccgccgccgcctcctcctgccccccctttgcgcttcggcgtcgccaccagtccccgcctccgaggcgactctctacgacgtgctcggggtcccgacgggcgccacgggcggcgagatcaaggtggcgtaccggcggctggcgcgagagtgccacccggacgtcgccgcggctaccgagtcgtcggacgagttcatccgactccacgccgcctacgccacgctctctgacccggagaagcgtgccgagtacgaccagcgggtaatggccgccacagcgaacgcagcggcagggaggcggtggtcgccgcggctgtcctactcgtgcaggccgtgccggaggtgggagacggatcagtgctggtaggcagacccggtgttagctgacccgagttgtataggataaagctgtacagattacggccatgatccatttttttttccctttttctttcgttttgttccctctcaacgcagggattgattttaaatcgtttgagtttttgtgtgattaaatggatcttataatctagtataaatttcagtatgaaagatatcatatccttc

SEQ ID NO: 124 - protein, 146 aa, Musa acuminata
  misc_feature: Ceres CLONE ID no.1728904
  misc_feature: Bit score of 124.6 for HMM based on sequences of FIGURE 10.
  misc_feature (49)..(110): Pfam Name: DnaJ Pfam Description: DnaJ domain
  misc_feature: Functional Homolog Of Ceres CLONE ID no. 31309 at SEQ ID NO. 60
MISSPSLAAPRSHLRFPPRLPSSSSCRRRLLLPPLCASASPPVPASEATLYDVLGVPTGATGGEIKVAYRRLARECHPDVAAATESSDEFIRLHAAYATLSDPEKRAEYDQRVMAATANAAAGRRWSPRLSYSCRPCRRWETDQCW

SEQ ID NO: 125 - DNA, 847 bp, Zea mays
  misc_feature: Ceres CLONE ID no.1698538
  misc_feature: Encodes the peptide sequence at SEQ ID NO 126
aaccgtagcccccgaagacacactccaagataccaagaacaccggccacacgcacgcgcgcgcgcaccgacgcacggcaggcgaggccgaggacgaacacacgataaaggaagcaatggctccgtcgctcgcgtcgacggcggggctcccgagctgcgcggcgcggcgcggcggccggtgcgtggcccgccgcgcgtccgcggttgcggctccggcgacggcgacggcgacggcgaggacgcactacgaggtgctcggggtcggggccggcgcgagccggtgcgagatcaaggcggcgtaccggcgcctggcgagggaggtgcacccggactgcggcggccgcggcgacgaggggttcatccgcctgcacgccgcgtacgccacgctcgcggaccccgacgagcgcgcgcgctacgaccgcgccgcggcggtccggagccggatcagggcggcgccgtcggggtccggagcggggttccggccgcggaggtgggagacggaccagtgctggtagcaccgtagcagcagccacgtagacgtagctgcgccggcggtggagtggagtcgccggagcgcgctcggtggtctggtccgtttccagggccagttgcgaccagcgggcccatattgaagacggcccacatgaaaaacggaccgcgatccgggcagcccacaatcacatgagttgggatcgtggactccacaatcacatgagttgggatcgtggactttatgggctgcaggcttcgtaggcctttcgcgccagacttggcgctggatgttgttgtaggccatcatagagctgcacgaagaggcatttttaacatcccaaaaaaaaaaaaaaaaa

SEQ ID NO: 126 - protein, 132 aa, Zea mays
  misc_feature: Ceres CLONE ID no.1698538
  misc_feature: Bit score of 108.8 for HMM based on sequences of FIGURE 10.
  misc_feature (42)..(101): Pfam Name: DnaJ Pfam Description: DnaJ domain
  misc_feature: Functional Homolog Of Ceres CLONE ID no. 31309 at SEQ ID NO. 60
MAPSLASTAGLPSCAARRGGRCVARRASAVAAPATATATARTHYEVLGVGAGASRCEIKAAYRRLAREVHPDCGGRGDEGFIRLHAAYATLADPDERARYDRAAAVRSRIRAAPSGSGAGFRPRRWETDQCW

SEQ ID NO: 127 - protein, 344 aa, Populus balsamifera subsp. trichocarpa
  misc_feature: Ceres ANNOT ID no.1503955
  misc_feature: Bit score of 586.1 for HMM based on sequences of FIGURE 9.
  misc_feature (117)..(331): Pfam Name: Trehalose_PPase Pfam Description: Trehalose-phosphatase
  misc_feature: Functional Homolog Of Ceres SEEDLINE ID no. ME20095 at SEQ ID NO. 1129
MTNQNVVVADTNSGINLAITVHVTNSSIFTTAAQKPPAAPGGYISISRKKLLKNLEISGGARFNAWVNSMRTSSPTHVKSTPSANDDQSSWILHHPSALEMFEQIIDASKGKQIVMFLDYDGTLSPIVDDPDRAFMSKKMRATVRKLARFFPTAIVSGRCRDKVYNFVRLAELYYAGSHGMDIKGPAKGSKYKKVYKELVEKTKTTPGAKVENNKFCLSVHYRCVDEKKWSGLAQVVKSVLKEYPKLRLTQGRKVLEIRPTIKWDKGKALEFLLESLGFANCTDVFPVYIGDDRTDEDAFKVLRERGQGFGILVSKFPKDTSASYSLQEPTQWKRLAFQGQSRV

SEQ ID NO: 128 - DNA, 1083 bp, Populus balsamifera subsp. trichocarpa
  misc_feature: Ceres ANNOT ID no.1473094
  misc_feature: Encodes the peptide sequence at SEQ ID NO 96
atgggatttcagagatcttcctattggcaaaaggtgcagcctggtagtgatctttctacaaaagagacggcaccaaattcaagtcaccctgtaaccaatgaagctgtttctgatgatgcagattacagttcatggatggtggaccatccttctgcattaacctcatttgatcagatgatgaaggatgcaaaggggaagaagatcgtcgtgtttttagactatgacggtactctctcgccgattgtaaatgatcctgaccgcgctttcatgtctgatgagatgcgtgcagcagttcgagaagttgcaaaatactttccaacagctataatcagtggtagaagcagagataagtttatgaggcagagtttgagaatgtcgatggtctctttcgtgcaggtgaaaggatttgtacagttgaataatatatattatgctggaagccatgggatggacatcatggcaccacctaggccggctaggtccagtgatggaaaataccatactgtttcccttgacagaaagggcaatgatgctgtctttcaacctgctcagaaatttttgcctgcaattcaaaagattttgaaagaactggaagaggcaattatgaaaataccaggtgccagagtagagaacaacagattttgtgcctccgtacattttcgacaagttagagaggaggattatgggaccttagaggagaaggtgaagtccatacttaaacactatccagactttcgcttgggttggggtaaaaaggttatggaaatacgaccatcaatagaatgggacaaaggcaatgccctggaatatttactcgatactctagggttaggtaactgcaccgatgttctcccactttacattggagatgacataacagatgaagatgctttcaaggtaattcaaaagagaggccaaggatgtccgatcgttgtcacttccagtcccaaggatactaaagcctcatactccctgtatgaaccatcagaagtgttgacattcttgttgcgtctagcaaggtggaggaaatcctctagttcgagtaggtcagtactatctcaggtttggggtgtgagtggttga

SEQ ID NO: 129 - DNA, 810 bp, Panicum virgatum
  misc_feature: Ceres CLONE ID no.1762328
  misc_feature: Encodes the peptide sequence at SEQ ID NO 130
acgacgacgaatcacgaagcacttgaagaagaaagcaacagcaacacaagcaatggcctcgttcgcatcgacggcggcatccgcttcgacagccgttccgagctgcggcgccggggcccggcgcggcgggcggtgcgtggcccgcgcgtccgcggtggcgatggcgccggcgaggacgcactacgaggtgctcggggtcggggccggggcgagcaggggcgagatcaaggcggcgtaccggcgcctggccagggaggtgcacccggacgccggcggctgcggcggcggcgacgagggcttcatccagctgcacgccgcgtacgccacgctcgcggaccccgacgagcgcgcgcgctacgaccgctcggtggtggcgcggcccgcggcccgcggggcggcgccgccggggttccggccgcggaggtgggagaccgaccagtgctggtagtggtagggacacagccgcgccgcctgcccgtcgcgccgcgtcttgcgctgccacggtgccacctccgccgctcaatcgtggccggcggtgaagtcgccggccgactggccggagcgcgctctgcgcaccggcaggcccatcccatcatgttggggaggaaaggggaaggcccgcgtggcccacttcgcgacccattggggcccaccagaaaacggaaccttgtccacggttgcacgaagagagacatttttcccatctcttgtgtacttacttgatcaccttgtaaatatggataattcctcgtcttggacggtaaacaatccaaagtaggcaagaaacggtaaaaaaaaaaaaaaaaaaaa

SEQ ID NO: 130 - protein, 131 aa, Panicum virgatum
  misc_feature: Ceres CLONE ID no.1762328
  misc_feature: Bit score of 102.9 for HMM based on sequences of FIGURE 10.
  misc_feature (42)..(103): Pfam Name: DnaJ Pfam Description: DnaJ domain
  misc_feature: Functional Homolog Of Ceres CLONE ID no. 31309 at SEQ ID NO. 60
MASFASTAASASTAVPSCGAGARRGGRCVARASAVAMAPARTHYEVLGVGAGASRGEIKAAYRRLAREVHPDAGGCGGGDEGFIQLHAAYATLADPDERARYDRSVVARPAARGAAPPGFRPRRWETDQCW

SEQ ID NO: 131 - DNA, 792 bp, Zea mays
  misc_feature: Ceres CLONE ID no.1590072
  misc_feature: Encodes the peptide sequence at SEQ ID NO 132
agcctcaaccacctgtggtggctgcttctctccccgctcccctcctgcccctttccttcgtcctcagatctgccgattccccgtccctgcgcctccgtctcatgatctctgcgcctctgcgggtgccggcgccgaaggctgccgccgggggttcgttcctgctcggcgcgtcctccgtcgagtccaatcccaatcccaagctcaagcccagcagggtccgctgcgccgccgccgccgccgccacgctgtacgaggtcctgggcctgcgcgccggcgcgacgggccgggagatcaaggccgcgtaccggcgcctggcgcgggagcggcacccggacgtggcgcacgcgcccggggccgccgccgagttcgcccgcctgcacgacgcctacgccacgctctccgacccggacagccgcgcgcgctacgacggcggcggcgccgcgcccgcggcggcggtggcgaggcgcccctggagcggcgccgtctacggccggccccgacgccgcacatgggagacggaccagtgctggtagtagagagtagagaggcacagccaagagccccacgcgcttcttgtctgtctgtagaatagttagacctcctgccgccagccatgcggccatggcggctcaccttggactttttttttggtttcggtggccatccatgtagcgtgatttttcgttttccttcctccacttgcccttgtacctgtgtgctgtggtcttgacttcttgagatgtaaatactagtacttgatgagatggttggaggagtaaaaaaaaaaaaaaa

SEQ ID NO: 132 - protein, 143 aa, Zea mays
  misc_feature: Ceres CLONE ID no.1590072
  misc_feature: Bit score of 98.0 for HMM based on sequences of FIGURE 10.
  misc_feature (48)..(109): Pfam Name: DnaJ Pfam Description: DnaJ domain
  misc_feature: Functional Homolog Of Ceres CLONE ID no. 31309 at SEQ ID NO. 60
MISAPLRVPAPKAAAGGSFLLGASSVESNPNPKLKPSRVRCAAAAAATLYEVLGLRAGATGREIKAAYRRLARERHPDVAHAPGAAAEFARLHDAYATLSDPDSRARYDGGGAAPAAAVARRPWSGAVYGRPRRRTWETDQCW

SEQ ID NO: 133 - DNA, 751 bp, Glycine max
  misc_feature: Ceres CLONE ID no.471593
  misc_feature: Encodes the peptide sequence at SEQ ID NO 134
gacgatagaaattcaatccacatgattttgaatatgagcatgttaccaatctttgttggccttacattttcattttttataagcactctagtctagtgccattcaagtgttctataaaatggcactccccatatcattctccttaaccctaatccagtatatgccaaattttctagaaaaattgtttccactctacaactgaaaacagagaactctgttcttgttctcaaaaaacaaaaaaaatggcttccctctatgacgtgcttggaatttcagtgggtgcaagctgcatcgaaataaaggctgcttacagaaagctggcaagaacacaccatcctgatgttgtggccatggatcagaaggaaagctcagcgaaccaattcatgatgatccattcagcttactcaactttgtctgacccagagaagcgagcacaatatgatagagaaatctatagatacagaagatcagcaaatatagcaggaagaaatcagacattttcctatgctggaagtggaaggaaatgggaaacagaccaatgttggtaacagattgtatagtcatgtacattattattaaccmctttgttctcttttttcttcttctctttttctaagtttttgttatgactatgtcattcatttatgttttccttcttcacaataccatcctaagactgtgtagttccagattacttactagatctcctgattcaagcttcgtgtaattttaatgccatgttgatttggtc

SEQ ID NO: 134 - protein, 101 aa, Glycine max
  misc_feature: Ceres CLONE ID no.471593
  misc_feature: Bit score of 97.1 for HMM based on sequences of FIGURE 10.
  misc_feature (3)..(67): Pfam Name: DnaJ Pfam Description: DnaJ domain
  misc_feature: Functional Homolog Of Ceres CLONE ID no. 31309 at SEQ ID NO. 60
MASLYDVLGISVGASCIEIKAAYRKLARTHHPDVVAMDQKESSANQFMMIHSAYSTLSDPEKRAQYDREIYRYRRSANIAGRNQTFSYAGSGRKWETDQCW

SEQ ID NO: 135 - DNA, 891 bp, Triticum aestivum
  misc_feature: Ceres CLONE ID no.1031667
  misc_feature: Encodes the peptide sequence at SEQ ID NO 136
ttcgacgaggacgaacaacagtgcaacaaagaagtactctgcttttggatcaagaactcgagaacagagaggagaatcgatggccacgttcgcgacgtcaacggcggcagtgatgggatcggctcgccctggccgggtggccgggcctcggcggtgcgtggtggcgcgcgcgtccgccatgatggcggcaccggcgccggtggcggccgggaggacgcactacgaggtgctcggtgtgagtgccagggcgagcaggggggagatcaaggaggcgtaccggcgtctggccagggaggtgcacccggacgctgctggtggcggcggcgacgaggggttcatccggcttcacgcggcctacgccacgctggccgaccctgacgagcgcgcgcgctacgaccgggacgtggcctgccgcaccgccgggatgatgatgcggcggccggccgcggccgggccggcgttccggcggaggacgtgggagaccgaccagtgctggtaggaggggcggacacacgacgacacgtggttgctcagttctcccgttcccggccggcggccgtctggttcgatcaggcacggcgtcgaggttgtcgatggtcgccaggaaggaaaccgcgtcgtctgacgtgcgccgtccgatcagtgttggccggtccagatctaacgacgcggatgcgggagagctgtgaactgcgacgcgacgagaggcattttttgaagatctcttgcgttcgaccagcaaatgattagctactgcctgtaaattaatggcctgggaaatgttatagctctctgtggttatagaaggaaatatttaccccctccatgtcatagttttttgtttgccaagtaaggattaaagggttactaacttcaaaaaaaaaaaaaaaa

SEQ ID NO: 136 - protein, 139 aa, Triticum aestivum
  misc_feature: Ceres CLONE ID no.1031667
  misc_feature: Bit score of 97.1 for HMM based on sequences of FIGURE 10.
  misc_feature (46)..(106): Pfam Name: DnaJ Pfam Description: DnaJ domain
  misc_feature: Functional Homolog Of Ceres CLONE ID no. 31309 at SEQ ID NO. 60
MATFATSTAAVMGSARPGRVAGPRRCVVARASAMMAAPAPVAAGRTHYEVLGVSARASRGEIKEAYRRLAREVHPDAAGGGGDEGFIRLHAAYATLADPDERARYDRDVACRTAGMMMRRPAAAGPAFRRRTWETDQCW

SEQ ID NO: 137 - DNA, 1176 bp, Panicum virgatum
  misc_feature: Ceres CLONE ID no.1826085
  misc_feature: Encodes the peptide sequence at SEQ ID NO 138
ggcactccaccctcggcgacgacggatcacgaaacacttgaagaagaaagcagcaggcagcaacgcaatggcttggttcgcatcgacggcagccgttccgagctgcggcgccggggcccggcgcggcggccggtgcggggcccgcgcgtccgcggtggcgatggcgccggggacggcgaggacgcactacgaggtgctcggggtcggggccggggcgagcaggggcgagatcaaggcggcgtaccggcgcctggccagggaggtgcacccggacgccggcggctgcggcggcgacgagggcttcatccagctgcacgccgcctacgccacgctcgcggaccccgacgagcgcgcgcggtacgaccgctcggtggcgcggcccgcggcccgcggggcggcgccggcggggttccggccgcggaggtgggagaccgaccagtgctggtagggacacagctgcgcctgcccgttgcgccgcgacctacgctgccacccacctccgccgctccatccgtggccggcggtgaagtcgccggccggccggcccatcccatcatgttggtggaggaaaggggaagggcccacgtggcccacttcgacagcgggtcgcgactattctccgcgacccactgggccgatccgcgatcagcccccggcccacgagttggatcggggacgacgcggcggcgcggcggcggaggtcactgcactgacctgaccagggcggaggatgggcccagggagcaggggagctcctctctcttcgtagcttgtccccccctgttacacgaagagaggcatttttataacatctcttgtgtacttacttgatcaccttgtaaatatggataatctgtgtgaatataaattctcgtcttggacggtaaactatccaagtaggcaagaaacggtaataatttccaagggtttcaaaagtgattgtgaggattttggttaaagacaggcaagtcaaccaatgctaatcctgcctgtttagcagtcatgttcttgctctcgtggctctgcacacttgttgctcgctcgcgctcactcgagagttcagtagctgtgacatgacaagggtcccaagctagcagaacaccaccacaagttctctcacaaggcaggagtcgctgccccaaaaaattcagttgccaaaaaaaaaaaaaaaaaaaa

SEQ ID NO: 138 - protein, 126 aa, Panicum virgatum
  misc_feature: Ceres CLONE ID no.1826085
  misc_feature: Bit score of 96.9 for HMM based on sequences of FIGURE 10.
  misc_feature (39)..(99): Pfam Name: DnaJ Pfam Description: DnaJ domain
  misc_feature: Functional Homolog Of Ceres CLONE ID no. 31309 at SEQ ID NO. 60
MAWFASTAAVPSCGAGARRGGRCGARASAVAMAPGTARTHYEVLGVGAGASRGEIKAAYRRLAREVHPDAGGCGGDEGFIQLHAAYATLADPDERARYDRSVARPAARGAAPAGFRPRRWETDQCW

SEQ ID NO: 139 - protein, 339 aa, Populus balsamifera subsp. trichocarpa
  misc_feature: Ceres ANNOT ID no.1526501
  misc_feature: Bit score of 478.0 for HMM based on sequences of FIGURE 9.
  misc_feature (71)..(308): Pfam Name: Trehalose_PPase Pfam Description: Trehalose-phosphatase
  misc_feature: Functional Homolog Of Ceres SEEDLINE ID no. ME20095 at SEQ ID NO. 1129
MGFQRSSYWQKVQPGSDLSTKETAPNSSHPVTNEAVSDDADYSSWMVDHPSALTSFDQMMKDAKGKKIVVFLDYDGTLSPIVNDPDRAFMSDEMRAAVREVAKYFPTAIISGRSRDKLNNIYYAGSHGMDIMAPPRPARSSDGKYHTVSLDRKGNDAVFQPAQKFLPAIQKILKELEEAIMKIPGARVENNRFCASVHFRQVREEDYGTLEEKVKSILKHYPDFRLGWGKKVMEIRPSIEWDKGNALEYLLDTLGLGNCTDVLPLYIGDDITDEDAFKVIQKRGQGCPIVVTSSPKDTKASYSLYEPSEVLTFLLRLARWRKSSSSSRSVLSQVWGVSG

SEQ ID NO: 140 - DNA, 1035 bp, Populus balsamifera subsp. trichocarpa
  misc_feature: Ceres ANNOT ID no.1503955
  misc_feature: Encodes the peptide sequence at SEQ ID NO 127
atgacaaaccaaaatgtggtagtggctgatacaaactctggaatcaacttggcaatcacagtgcatgtaacaaattcctctatcttcaccacggccgcgcagaagcctccggcggctcctggtggttacatctctatttccagaaagaaacttttaaagaatcttgaaatcagtggaggagcaagatttaatgcttgggttaattccatgagaacctcttctcctactcatgtcaagtccacaccttctgctaatgacgaccaaagctcatggattcttcaccacccatcagcactggagatgtttgagcagataattgatgcctccaaaggaaagcaaatagttatgttcttggactatgatggcacactttctcctatcgttgatgacccagatagagctttcatgtccaagaagatgagagcaacagtgagaaagcttgcgagattttttcctactgcaatagtgagtgggagatgcagagacaaggtgtataactttgtacggttagcagaactgtactatgctggaagccatggcatggacatcaaaggaccagccaaaggcagcaaatacaagaaagtttacaaagaactggtagagaaaactaaaacaactccaggggccaaggtggaaaataacaaattctgtctctctgtgcactatcgctgcgttgatgagaagaaatggagtggactggctcaagtagttaagtcagtgttgaaggagtacccaaagcttcgacttactcaaggaagaaaggttttagaaatccgccctaccattaaatgggacaaaggaaaggctcttgaatttttgttagagtctcttggattcgccaattgtactgatgtttttcctgtttacattggagatgatagaacagacgaggatgcatttaaggtgctgagagagagaggacaaggttttggtatcttggtctctaaattccccaaggacactagtgcatcttattccctacaagaacccacccagtggaaacggctagcctttcaagggcagtcaagggtttaa

SEQ ID NO: 141 - DNA, 817 bp, Zea mays
  misc_feature: Ceres CLONE ID no.373932
  misc_feature: Encodes the peptide sequence at SEQ ID NO 142
aacgccaacgcctcaaccacctgtggtggcttctcctctccccgctccccccctgccccttcccttcgtcctcagatccgccgatcccccgcccctgcgcctccgtctcatgatctctgcgcctctgcgggtgccggcgccgaaggctgccgccgggggttcgttcctgctcggcgcgtcctccgtcgagtccaatcccaatcccaagcccagcaggatccgctgcgccgccgccacgctgtacgaggtcctgggcctgcgcgccggcgcgacgggccgggagatcaaggccgcgtacaggcgcctggcgcgggagcggcacccggacgtggcgcacgcgcccggggccgccgccgagttcgcccgcctgcacgacgcctacgccacgctctccgacccggacagccgcgcgcgctacgacggcggcggcgccgcgcccgcggcggcggtggcgaggcgcccctggagcggcgccgtctacggccggccccgacgccgcacatgggagacggaccagtgctggtagtagagagtagagaggcacagccaagagccccacgcgcttcttgtctgtctgtagaatagttagacctcctgccgccagccatgcggccatggcggctcaccttggactttttttttggtttcggtggccatccatgtagcgtgatttttcgttttccttcctccacttgcccttgtacctgtgtgctgtggtcttgacttcttgagatgtaaatactagtacttgatgagatggttggaggagtagccgccctgcctctgttaattctaaataatccaagctgttctctcc

SEQ ID NO: 142 - protein, 138 aa, Zea mays
  misc_feature: Ceres CLONE ID no.373932
  misc_feature: Bit score of 93.6 for HMM based on sequences of FIGURE 10.
  misc_feature (43)..(104): Pfam Name: DnaJ Pfam Description: DnaJ domain
  misc_feature: Functional Homolog Of Ceres CLONE ID no. 31309 at SEQ ID NO. 60
MISAPLRVPAPKAAAGGSFLLGASSVESNPNPKPSRIRCAAATLYEVLGLRAGATGREIKAAYRRLARERHPDVAHAPGAAAEFARLHDAYATLSDPDSRARYDGGGAAPAAAVARRPWSGAVYGRPRRRTWETDQCW

SEQ ID NO: 143 - DNA, 594 bp, Gossypium hirsutum
  misc_feature: Ceres CLONE ID no.1797836
  misc_feature: Encodes the peptide sequence at SEQ ID NO 144
accttaaaacccttttgtttatcaatggcttcatctgtctcattgtacgaggttcttggtgtaccagtgagtgcaaacggtagtgaaatcaaggcagcttatagaagacttgcgagaacgtggcaccctgatgttgtgtctgtaaaccagaaagaaatgtctgctgatcggttcatgagaatccatgcagcgtattccacgttgtcggatcctaatcaacgtgcggattatgataggaatcttagacggtggaaccgtccctttacgactatggaagcaactgcgacggcggtggcttcgtatgggttttctagttatggtgctaataggaattgggagaccgatcagtgctggtagttaattatatgtattttttttatgttcgttttatatccatgaaatttaatctttttagaatttatagttatctctaacttttattcttaaaaatgtaatatatttttccattgtacctaacataatcaatgtcgtattccattgtgacaagtcccatggtctttattgtaaattaatcaggagcaaatccagaggctggcagggcccaacccctttaaaatgaaaattttatcattc

SEQ ID NO: 144 - protein, 110 aa, Gossypium hirsutum
  misc_feature: Ceres CLONE ID no.1797836
  misc_feature: Bit score of 89.8 for HMM based on sequences of FIGURE 10.
  misc_feature (6)..(70): Pfam Name: DnaJ Pfam Description: DnaJ domain
  misc_feature: Functional Homolog Of Ceres CLONE ID no. 31309 at SEQ ID NO. 60
MASSVSLYEVLGVPVSANGSEIKAAYRRLARTWHPDVVSVNQKEMSADRFMRIHAAYSTLSDPNQRADYDRNLRRWNRPFTTMEATATAVASYGFSSYGANRNWETDQCW

SEQ ID NO: 145 - DNA, 489 bp, Brassica napus
  misc_feature: Ceres CLONE ID no.1102774
  misc_feature: Encodes the peptide sequence at SEQ ID NO 146
aatctctcttcatttccctctctcgaacaagaagacaacaactcaaaacgcagagaagatctccagaacgacaccgtttcgtagcaaagatgctttcktcgtctccaacctccttcactcatccattcctctccacgtctccgcctctctcccccatatctccgccgtctcgctcacctcgcctcccgcctcctctcgtctccgcctcttgctcctacacctgcacggaggatccgccgaggctgcaccagatcccgcggcgaacgacgccggcgaacgcttcgctctacgagattctagaggttcctcgcggcgcgacgagccaggatatcaaatcggcttaccggaggttggctaggatctgccaccccgacgtggcggcgggaaccgatcggagtaactcttcggcggatgagttcatgaagatccacgcggcgtactgtacgctctctgatcctgacaaacgctctgtttacgatcggaggatgc

SEQ ID NO: 146 - protein, 133 aa, Brassica napus
  misc_feature: Ceres CLONE ID no.1102774
  misc_feature: Bit score of 82.3 for HMM based on sequences of FIGURE 10.
  misc_feature (65)..(130): Pfam Name: DnaJ Pfam Description: DnaJ domain
  misc_feature: Functional Homolog Of Ceres CLONE ID no. 31309 at SEQ ID NO. 60
  misc_feature (3)..(3): Xaa is any aa, unknown, or other
MLXSSPTSFTHPFLSTSPPLSPISPPSRSPRLPPPLVSASCSYTCTEDPPRLHQIPRRTTPANASLYEILEVPRGATSQDIKSAYRRLARICHPDVAAGTDRSNSSADEFMKIHAAYCTLSDPDKRSVYDRRM

SEQ ID NO: 147 - DNA, 677 bp, Triticum aestivum
  misc_feature: Ceres CLONE ID no.842287
  misc_feature: Encodes the peptide sequence at SEQ ID NO 148
aacccgaagtgctcaactcccagctcactcgaccccccagctcccaactctaccccgaccaagcgaagcgagccgagaagatcttagccaatggcgggagcagtgcctctggcgccgccgatggtggccgcggcgaggccggcggcgggctcgctctacgaagcgctgcgcgtgggccgcgcggcgacgcaggtggagatcaggaccgcgtaccgctccatggccaagcgcctccaccccgacgtcgcctcctgcggccacgggggccccgaggcgttcctggagatccggagggcgtacgagacgctgtcggacccggcggccagggcgcgctacgactgctcgctcggggtgttccgcggtgggggcgccggcggcgtgatgcgggtgcggaggtgggagacggaccagtgctggtgaagtggtgatccaccaagccatggtatgggcaatagcatcgctcccaggaagtcaggaacgtggatgagctgcaacggcctgtgttggtgtcctcggcgtagttagtgctaagttagtggagaggttgtgatgtgggtccagccgtcggtccccctatgcagccggccccactttttggtctttttggggccactcttggtcctggtgatgtagcttttgtgaatatatattcaagcttgctactgttcagctgcttt

SEQ ID NO: 148 - protein, 109 aa, Triticum aestivum
  misc_feature: Ceres CLONE ID no.842287
  misc_feature: Bit score of 73.5 for HMM based on sequences of FIGURE 10.
  misc_feature (21)..(83): Pfam Name: DnaJ Pfam Description: DnaJ domain
  misc_feature: Functional Homolog Of Ceres CLONE ID no. 31309 at SEQ ID NO. 60
MAGAVPLAPPMVAAARPAAGSLYEALRVGRAATQVEIRTAYRSMAKRLHPDVASCGHGGPEAFLEIRRAYETLSDPAARARYDCSLGVFRGGGAGGVMRVRRWETDQCW

SEQ ID NO: 149 - DNA, 440 bp, Triticum aestivum
  misc_feature: Ceres CLONE ID no.568205
  misc_feature: Encodes the peptide sequence at SEQ ID NO 150
attcccgtctcccctcacctgcctacttttcctctgctcccccgactcatccgtccgtctctcccgttctctcttctcagatttgtggattcgtgtgatgatttcaccgcccccggtgatgcaatcctccgcggcgaggcccgccttggccgggttccgccatgccgccgcctgctccagctcccgccggacggtccggtgcgcggtggccgtcgcgtcggcggcgccggccgggaggtgcacgctgtacgaggtgctcgggctgcgggccggcgccacgcgcggcgagatcaaggccgcctaccggcgactggctcgggagcggcacccggacgtggccggcgcggccggcgacgacttcatccgcctgcacgacgcctacgccacgctctccgacccggacgcccgcgcgcgctacgaccgcgacgtcgtcgtgcagg

SEQ ID NO: 150 - protein, 146 aa, Triticum aestivum
  misc_feature: Ceres CLONE ID no.568205
  misc_feature: Bit score of 56.3 for HMM based on sequences of FIGURE 10.
  misc_feature (81)..(140): Pfam Name: DnaJ Pfam Description: DnaJ domain
  misc_feature: Functional Homolog Of Ceres CLONE ID no. 31309 at SEQ ID NO. 60
FPSPLTCLLFLCSPDSSVRLSRSLFSDLWIRVMISPPPVMQSSAARPALAGFRHAAACSSSRRTVRCAVAVASAAPAGRCTLYEVLGLRAGATRGEIKAAYRRLARERHPDVAGAAGDDFIRLHDAYATLSDPDARARYDRDVVVQ

SEQ ID NO: 151 - DNA, 717 bp, Glycine max
  misc_feature: Ceres CLONE ID no.1075133
  misc_feature: Encodes the peptide sequence at SEQ ID NO 152
gtgtgattcatatctgcttctcagacgaactctctctgcttaatccaaattttaacgcgttctttcgaatttgcccctccaattttaatttaattacgtaaatgtccggaactctaatctacttaggcgttaactcccttcgatcctcgccgggaaatagccttcgtcaaccgaagccaaccagactccacaacggaaacgcgcggctctccaccggagctacgtcgtttagagcttcggcagcgcagactctcaacgccgaaccagccgtaacggaatccgttcgccggcgagcgtcgaacctctacgaactgctgagagtggacgaaacggcgtcgttgacggagattaagacggcgtaccggagcttagctaaggttcaccatccggacgcgtcgtcggaatcggacggacgagatttcatggagattcacaaagcttacgcgacgctggcggatccgacgacgagagcgatctacgattcgacgctgggagcaagagggagacgagtgcacgctggagcgatggggaggacgagtcgggtttacccgacgacccggagatgggagacggatcagtgttggtagtttagtctttaggtttccgattacttttttttactcaatttccccttttcattattttttttactaaggggtaaataagttttttttaccacagatggtttaatgaatagagagatgtacatttttgggg

SEQ ID NO: 152 - protein, 161 aa, Glycine max
  misc_feature: Ceres CLONE ID no.1075133
  misc_feature: Bit score of 387.6 for HMM based on sequences of FIGURE 10.
  misc_feature (67)..(127): Pfam Name: DnaJ Pfam Description: DnaJ domain
  misc_feature: Functional Homolog Of Ceres CLONE ID no. 31309 at SEQ ID NO. 60
MSGTLIYLGVNSLRSSPGNSLRQPKPTRLHNGNARLSTGATSFRASAAQTLNAEPAVTESVRRRASNLYELLRVDETASLTEIKTAYRSLAKVHHPDASSESDGRDFMEIHKAYATLADPTTRAIYDSTLGARGRRVHAGAMGRTSRVYPTTRRWETDQCW

SEQ ID NO: 153 - DNA, 480 bp, Sorghum bicolor
  misc_feature: Ceres ANNOT ID no.6108997
  misc_feature: Encodes the peptide sequence at SEQ ID NO 154
atgatctccccgcgccccgcgctctcccccagcttcctcgccttccggccgggctccctctccccggccgcgtcgccgccgccgtccccgcgcctccaccacgcgccgccgcccctctccgcctccatctcctccaccgtcgctgccaccgcggcgccgggccacgcggcggcggccagctccttctacgacgtcctcggcctccgccccggggccagtgcgcgggagatcaaggccgcgtaccgtcgcctggcgctcgccgtccacccggacgccgccgccgccgcctcgtccgccgaggacttcatccgcgtccacgcggcctactccacgctctccgaccccgacaagcgcgccgactacgaccgccgcctcctcctctccgccgccgcgagacggcgcaccgccgctctcggacgctcgccctcgttcccagcgcaccgttcccgccggacctgggagactgaccagtgctggtga

SEQ ID NO: 154 - protein, 159 aa, Sorghum bicolor
  misc_feature: Ceres ANNOT ID no.6108997
  misc_feature: Bit score of 264.8 for HMM based on sequences of FIGURE 10.
  misc_feature (61)..(122): Pfam Name: DnaJ Pfam Description: DnaJ domain
  misc_feature: Functional Homolog Of Ceres CLONE ID no. 31309 at SEQ ID NO. 60
MISPRPALSPSFLAFRPGSLSPAASPPPSPRLHHAPPPLSASISSTVAATAAPGHAAAASSFYDVLGLRPGASAREIKAAYRRLALAVHPDAAAAASSAEDFIRVHAAYSTLSDPDKRADYDRRLLLSAAARRRTAALGRSPSFPAHRSRRTWETDQCW

SEQ ID NO: 155 - DNA, 414 bp, Sorghum bicolor
  misc_feature: Ceres ANNOT ID no.6023609
  misc_feature: Encodes the peptide sequence at SEQ ID NO 156
atggcttcgtcgctcgcgtcgacgccggtgttccccagctgcggcgcgcggcgcggcgcccggtgcgtggcgcgcgcgtccgcgtccgcggtggcggtggcggtggcgtctccgtcggcggcgaggacgcactacgaggtgctcggggtcggggccggcgccagcaggtgcgagatcaaggcggcgtaccggcgcctggcgagggaggtgcacccggacgccggcggccgcggcgacgaagggttcatccgcctgcacgacgcgtacgccacgctcgcggaccccgacgagcgcgcgcgctacgaccgcgccgtggccgtcgccgcgccggtccggaacggcagctgggccgcgccgtcagggtccgggtcggggttccggccgcggaggtgggagaccgaccagtgctggtag

SEQ ID NO: 156 - protein, 137 aa, Sorghum bicolor
  misc_feature: Ceres ANNOT ID no.6023609
  misc_feature: Bit score of 102.6 for HMM based on sequences of FIGURE 10.
  misc_feature (43)..(102): Pfam Name: DnaJ Pfam Description: DnaJ domain
  misc_feature: Functional Homolog Of Ceres CLONE ID no. 31309 at SEQ ID NO. 60
MASSLASTPVFPSCGARRGARCVARASASAVAVAVASPSAARTHYEVLGVGAGASRCEIKAAYRRLAREVHPDAGGRGDEGFIRLHDAYATLADPDERARYDRAVAVAAPVRNGSWAAPSGSGSGFRPRRWETDQCW

SEQ ID NO: 157 - DNA, 312 bp, Sorghum bicolor
  misc_feature: Ceres ANNOT ID no.6017906
  misc_feature: Encodes the peptide sequence at SEQ ID NO 158
atggcgggagcggtgcccctggccacggcgccggcactcgcggcggcggggagcctgtacgaggcgctgcgggtaggccgcgccgcgacgcaggtggagatcaaggtcgcctaccgcgccatggccaagcgcctccaccccgacacctcccgctcgtcccgaactgcggcggcgttcctggagatccagcgcgcctacgagacgctgtcgaacccggacgcccgagcgcactacgaccgctcgctcggcccgcggccgggcgccggcggcggcatgcgggtgcgtcggtgggaaacggaccagtgctggtag

SEQ ID NO: 158 - protein, 103 aa, Sorghum bicolor
  misc_feature: Ceres ANNOT ID no.6017906
  misc_feature: Bit score of 75.4 for HMM based on sequences of FIGURE 10.
  misc_feature (18)..(79): Pfam Name: DnaJ Pfam Description: DnaJ domain
  misc_feature: Functional Homolog Of Ceres CLONE ID no. 31309 at SEQ ID NO. 60
MAGAVPLATAPALAAAGSLYEALRVGRAATQVEIKVAYRAMAKRLHPDTSRSSRTAAAFLEIQRAYETLSNPDARAHYDRSLGPRPGAGGGMRVRRWETDQCW

SEQ ID NO: 159 - DNA, 1102 bp, Arabidopsis thaliana
  misc_feature: Ceres CLONE ID no.41543
  misc_feature: Expected Sequence
  misc_feature: Encodes the peptide sequence at SEQ ID NO. 160
atatgcagagagaaaaagaagccaattggttctctctctctctctctctctctctgattgattgatccagcgattcgtctggctggctcggtttccgcgggaaaaccttcttcttcgttgaccttacacgagttttgttgattcggcagggggatcgacgacggagatggcgattctgtacgccctcgtggctcgtggcacggtggttctttctgagttcaccgccacctctacgaatgcgagcaccatcgccaaacagatcctcgagaaggtccctggagacaacgacagcaacgtctcctactctcaggatcgttacgtcttccacgttaaacgcaccgatggcctcaccgttctctgtatggccgaagaaaccgccggaaggagaattccttttgcctttttggaggatattcaccagagattcgtacggacttatggcagggctgttcatacagcactagcttatgcaatgaatgaggaattctctagagttctcagtcagcagattgactattactctaatgatcctaatgccgataggattaatcgtattaagggtgaaatgaatcaggtgcggggtgtcatgatagaaaacattgacaaagtcctagatagaggtgaacgtttggagcttcttgtcgataaaaccgccaatatgcaggggaatacattccggttcagaaagcaagctcgtcgttttagaagcaacgtctggtggagaaactgcaagctcacggtcctcttaatactactactactggtgatcatatacattgcagtggcctttctctgccacggacctactctaccatcttgcatttaagtgcatctgtctcttaaggaatccatcccgattctgcgcgttgccacgactttttatctcctcatctgattgtaaaccttgtgttttcctgagcattttcatgtggcttaaaaagcttatgtttccaactcacgtatatgaaaaagtatacttatttatagagcaatgtaaaagctcattgctttgcgaagtgtgtgaatctttgttgacatcatgttctataaattacatacatagtggaaaagtgaacaggcttgctttgtctgatatgttcat

SEQ ID NO: 160 - protein, 219 aa, Arabidopsis thaliana
  misc_feature: Ceres CLONE ID no.41543
  misc_feature: Bit score of 646.6 for HMM based on sequences of FIGURE 13.
  misc_feature (123)..(211): Pfam Name: Synaptobrevin Pfam Description: Synaptobrevin
MAILYALVARGTVVLSEFTATSTNASTIAKQILEKVPGDNDSNVSYSQDRYVFHVKRTDGLTVLCMAEETAGRRIPFAFLEDIHQRFVRTYGRAVHTALAYAMNEEFSRVLSQQIDYYSNDPNADRINRIKGEMNQVRGVMIENIDKVLDRGERLELLVDKTANMQGNTFRFRKQARRFRSNVWWRNCKLTVLLILLLLVIIYIAVAFLCHGPTLPSCI

SEQ ID NO: 161 - DNA, 1001 bp, Gossypium hirsutum
  misc_feature: Ceres CLONE ID no.1837065
  misc_feature: Encodes the peptide sequence at SEQ ID NO 162
acatctgtcaaagcgatatagggagagtttcgactttagatggcgatattgtacgcgctggtcgcgcgtggatcggtgatgctggcggagttcacggcggcgtcgactaacgccagcgcgatcgccaggcaaattctagacaagataccgggtgacaacgacattaacgtttcgtattcacaagatcgatacatcttccacgttaaacgcaccgatggactcaccgttctttgtatggctgatgaaagtgccggaaggcgaattccttttgcgtttcttgaagacattcatcagagattcgttaggacttatggccgagcaatattttcagcccttccttatggcatgaatgatgaattttcgagggttttgagccagcaaatggaatattactcgagcgatcctaatgctgataggataaatcgactaaaaggtgaaatgggtcaggtgcgaaacgttatgatagagaacatcgacaaagtcttagagagaggtgatcgcttggaattgctggttgataaaactgctaatatgcaaggaaatacctttcgcttccgaaagcaaactcgccgacttagaaacacagtatggtggagaaatgtcaagcttacgggtgctctgataatcctcatcctaattattatttatgttgtgctggcttttgtttgccacggtatcacgctacctacttgcataaaatgatgtcaacaggtttgagatttgaacgcctttcgcactctcatgctcccttgccgttacttttgtttccatttccgttcgtatggtttttaatctctgcttgggggtagcatatctgggatctttctgtttcaacttcccctgcagtgagttgtatttacattttacttattcaatgtgaaagagtctccatgtaactttaaattggttttcaaagacatggcttgatggcattaaaatttatgtaaaagttacatacattatatatatatcttatttgcgaaaaaaaaaaaaaaaaaaaa

SEQ ID NO: 162 - protein, 220 aa, Gossypium hirsutum
  misc_feature: Ceres CLONE ID no.1837065
  misc_feature: Bit score of 654.0 for HMM based on sequences of FIGURE 13.
  misc_feature (123)..(211): Pfam Name: Synaptobrevin Pfam Description: Synaptobrevin
  misc_feature: Functional Homolog Of Ceres CLONE ID no. 41543 at SEQ ID NO. 160
MAILYALVARGSVMLAEFTAASTNASAIARQILDKIPGDNDINVSYSQDRYIFHVKRTDGLTVLCMADESAGRRIPFAFLEDIHQRFVRTYGRAIFSALPYGMNDEFSRVLSQQMEYYSSDPNADRINRLKGEMGQVRNVMIENIDKVLERGDRLELLVDKTANMQGNTFRFRKQTRRLRNTVWWRNVKLTGALIILILIIIYVVLAFVCHGITLPTCIK

SEQ ID NO: 163 - DNA, 1292 bp, Gossypium hirsutum
  misc_feature: Ceres CLONE ID no.1895763
  misc_feature: Encodes the peptide sequence at SEQ ID NO 164
aacgaattaaccaatttttttaaaactcactgatttttaattgaagtcaatttcggtttttttttccctggattttcttttataaaataattatatttgctcaattaatttttattttccagcaggcaaaattccctgtttggttcaactcgtcccaaaacaaagttcttttaagactaatccccaaaaatttcgcataaaacacctcttcgttgctgcccccgccatctaatttagctttgaaatcagtaaaaaaaagaagaaggaaggttctcgatggcgattctttacgccgtggtggctcgaggcacggtggttctagcggagtttagtgccgtaacggggaacaccggtgcggtggcacgacggatcctcgagaaacttccgccagaagccgattcaagactctgtttatcgcaggatcgttatatctttcatatacttagatcggatagcctcactttcctctgtatggctaatgatacctttggaaggagagttccattttcatacttggaggatattcacatgaggttcatgaaaaattatggtagagtggctcgttatgcaccggcatacgcgatgaatgatgagttctcacgggtattgcatcaacaaatggagtttttctccagtagtccaagtgcagatactctcaatcgtgttagaggtgaagtgggtgagatacgttcaatcatggtggaaaacattgagaagatactcgagagaggtgacaggattgagcttcttgttgacaaaactgctacaatgcaggatgatgcttttcacttcaagaaacagtctaaacgccttcgtcaagcactttggatgaaaaatgccaaactcttggccatgctaacatgcttgatcgtgcttatactctacctaataattgctgcttgctgtggtggtatcactctaccatcatgcagatcctgagtgacgcactcactcgtttaaattcctctactaaggtatgcatctcaaggattattttatgcaagtttgttccaatagttcatctgttttgagttcggttttgaggaatatttgtaaacatagtgtttattacgatactgctctagaatcccagcaaaatatctatatagttcacaactcttcctgcacctcatcacctagatattataatcttggaagaatgagttgccattaaagttgcggtggatcatctttgtattctgtaaatgcatggaatatatgtagtagtgaattttttatttgttttcagggttcaaataaatgcttttttggaaaaaaaaaaaaaaaaaaaa

SEQ ID NO: 164 - protein, 220 aa, Gossypium hirsutum
  misc_feature: Ceres CLONE ID no.1895763
  misc_feature: Bit score of 550.1 for HMM based on sequences of FIGURE 13.
  misc_feature (123)..(211): Pfam Name: Synaptobrevin Pfam Description: Synaptobrevin
  misc_feature: Functional Homolog Of Ceres CLONE ID no. 41543 at SEQ ID NO. 160
MAILYAVVARGTVVLAEFSAVTGNTGAVARRILEKLPPEADSRLCLSQDRYIFHILRSDSLTFLCMANDTFGRRVPFSYLEDIHMRFMKNYGRVARYAPAYAMNDEFSRVLHQQMEFFSSSPSADTLNRVRGEVGEIRSIMVENIEKILERGDRIELLVDKTATMQDDAFHFKKQSKRLRQALWMKNAKLLAMLTCLIVLILYLIIAACCGGITLPSCRS

SEQ ID NO: 165 - DNA, 1070 bp, Gossypium hirsutum
  misc_feature: Ceres CLONE ID no.1850460
  misc_feature: Encodes the peptide sequence at SEQ ID NO 166
atttttctatatcttctcggatcccatcgaccctccgaagtcatctctcactgatttttcaacctttgcggatttgaatctttgcttgagggttagggttttgagagatggggcaacagtctttgatctacagcttcgtggcgcgtggaactgtgatactcgccgagtacaccgagttcaccggtaatttcaccggtatcgccgctcaatgtctccagaaactccctgcttctaacaacaagttcacctatacctgcgatggccataccttcaattacctcgttgaagatggattcacctactgtgtagttgctgttgaatctgctggcaggcaagttccaattgcatttctggaaagagttaaggaagacttcaacaagagatatggtggaggaaaggctgcaactgctacggccaaaagtctgaatagagaatttgggtccaaattgaaggagcatatgcagtactgtgtggaccatcctgaagaaatcagcaaacttgctaaagtgaaggctcaggtttctgaagtcaagggtgttatgatggaaaacatcgagaaggtccttgaccgtggtgagaagattgagttgctggtggataaaactgagaaccttcgctcacaggcccaagattttaggcagcagggaacaaagatgagaagaaagatgtggcttcagaatatgaagataaaattgatcgttctgggtatcctgattgccttgattcttatcattgtgctgtctgtctgccatggcttcaattgttaaaatctgtcttggatttcccttgttctgctttttgctgccttgctgactggagtctcgatagattggtttgttttactttgttgttttaggtcgcatatttctcccttcgcttgccatatagtaggatagagggagactttgtatcttggttgattgtataggttatagttccattgaaggatttcttctctcatgttgtaatggagaaatacttggatgcctgcatatccctccccccccccctttcttttgaaatgttattgacttggttgttttgacttgcaaaaaaaaaaaaaaaaaaaa

SEQ ID NO: 166 - protein, 219 aa, Gossypium hirsutum
  misc_feature: Ceres CLONE ID no.1850460
  misc_feature: Bit score of 180.4 for HMM based on sequences of FIGURE 13.
  misc_feature (127)..(215): Pfam Name: Synaptobrevin Pfam Description: Synaptobrevin
  misc_feature: Functional Homolog Of Ceres CLONE ID no. 41543 at SEQ ID NO. 160
MGQQSLIYSFVARGTVILAEYTEFTGNFTGIAAQCLQKLPASNNKFTYTCDGHTFNYLVEDGFTYCVVAVESAGRQVPIAFLERVKEDFNKRYGGGKAATATAKSLNREFGSKLKEHMQYCVDHPEEISKLAKVKAQVSEVKGVMMENIEKVLDRGEKIELLVDKTENLRSQAQDFRQQGTKMRRKMWLQNMKIKLIVLGILIALILIIVLSVCHGFNC

SEQ ID NO: 167 - DNA, 1042 bp, Gossypium hirsutum
  misc_feature: Ceres CLONE ID no.1808074
  misc_feature: Encodes the peptide sequence at SEQ ID NO 168
agtcacgctaccttgcttttcatctaagcgaaaagggaaaaggaaacaactctccttccttccgacgataaaaacccttccccttcctcttgctcttcatttcaattcattcttccttagtcaaaggactgtgatggggcaacaatcgctgatctacgccttcgtggcacgaggcaccgtcgttttagccgactacaccgagttctccggcaacttcacctccattgcttctcagtgcctccagaaacttcctgcttccaacaacaagttcacttacaactgcgacggccatacctttaactatctcgttgataacggctttacttactgtgtggttgctgttgaatctgctgggcgacaggtgccaattgcctttcttgagagaattaaggaggattttaccaagagatatggtggaggaaaagctgcagctgctcctgcaaacagcttgagcaaggagtttgggccaaagttgaaggagcatatgcagtattgcattgatcatccagaggaggttagtaagattgccaaagtgaaagctcaagtttcagaagtcaaaggagttatgatggaaaacattgagaaggttctggaccgtggtgaaaaaattgagcttttggtggataaatcagaaaatcttcgctcccaggcacaagatttcaggcagcaggggacccagatgaggagaaagatgtggttacagaacatgaaaataaagctgatcgtgctcgggattctgatcgccttgattctcatcatcgtactgtctgtctgtcatggcttcaactgttgatgaatcactcagttgctatattctattcatttgcccactcattgatcggtgttgtagctgtcaccagtaatattgatgctcctcatagttagtagttacagttttctttaattccacgtccttttctgctgtagcctaatatcagaagactctctgcatatatactgagattcgaactatggaaattgaattttgaaatatataaaaatatcaaataaggtactttcagaaaaaaaaaaaaaaaaaaaa

SEQ ID NO: 168 - protein, 219 aa, Gossypium hirsutum
  misc_feature: Ceres CLONE ID no.1808074
  misc_feature: Bit score of 169.0 for HMM based on sequences of FIGURE 13.
  misc_feature (127)..(215): Pfam Name: Synaptobrevin Pfam Description: Synaptobrevin
  misc_feature: Functional Homolog Of Ceres CLONE ID no. 41543 at SEQ ID NO. 160
MGQQSLIYAFVARGTVVLADYTEFSGNFTSIASQCLQKLPASNNKFTYNCDGHTFNYLVDNGFTYCVVAVESAGRQVPIAFLERIKEDFTKRYGGGKAAAAPANSLSKEFGPKLKEHMQYCIDHPEEVSKIAKVKAQVSEVKGVMMENIEKVLDRGEKIELLVDKSENLRSQAQDFRQQGTQMRRKMWLQNMKIKLIVLGILIALILIIVLSVCHGFNC

SEQ ID NO: 169 - DNA, 1094 bp, Gossypium hirsutum
  misc_feature: Ceres CLONE ID no.1832882
  misc_feature: Encodes the peptide sequence at SEQ ID NO 170
aatttttaaaccttattaaccctttttcactttccatttttacttcttgtttctagatatatcaaaaaagtccaacaaaagagtaattgtgaagagaaaccaagggggaaaaagcaatagaaaagagcaagcaagcttcaaatcccagatctctctttgttttctccttgaaacccaaattttcccaaataagaaaagcttctgagaaaatggtgcccaaatcattgatctatgcatttgtatctcgtggaggagttatattagctgagtatactgaatacagtgggaatttcaattccatagctcttcaatgcctccaaaagcttccttcttcaaacaacaagttcacttacaactgtgatggccataccttcaattatcttgttgacaatggatacacttattgcgttgttgcagatgagtcagctggaaggcaagtgccgattgcttttttggagcgtatcaaggatgatttcgtgtcgaaatatgataacgggaaggctgctacagctcctgccaacagcctgaacaaggaatttgggccaaaactgaaagaacatatgcaatactgtatggagcatcctgaagaaataagcaagctagctaaggtcaaagctcaggtttctgaagtcaaaggtgttatgatggagaacatcgaaaaggtgttagatagaggggaaaagatagagctgctagtggataagactgagaatcttcataatcaggctcaagactttcgaagtacagggacaaaaatccgaagaaaaatgtggctacaaaacatgaagatcaagctgattgttctaggaatacttattgccttgatccttatcattgtcctctctgtttgccatggtttcaactgtggcaaaaaataaatgctattcttagaaggctgtattagctttcaccgcagcttttgtgatataatcttgtaagggaaagtttaaaatacatacatatatatataatactttatatgtcataaaagacttaacatttagcaatcaccaggtgactggtgtaagttattttttattgtgaagaaaaaaaaaaaaaaaaaaaaaaaaaaataaaaaaaaaaaaaaaaaaaa

SEQ ID NO: 170 - protein, 222 aa, Gossypium hirsutum
  misc_feature: Ceres CLONE ID no.1832882
  misc_feature: Bit score of 170.1 for HMM based on sequences of FIGURE 13.
  misc_feature (127)..(215): Pfam Name: Synaptobrevin Pfam Description: Synaptobrevin
  misc_feature: Functional Homolog Of Ceres CLONE ID no. 41543 at SEQ ID NO. 160
MVPKSLIYAFVSRGGVILAEYTEYSGNFNSIALQCLQKLPSSNNKFTYNCDGHTFNYLVDNGYTYCVVADESAGRQVPIAFLERIKDDFVSKYDNGKAATAPANSLNKEFGPKLKEHMQYCMEHPEEISKLAKVKAQVSEVKGVMMENIEKVLDRGEKIELLVDKTENLHNQAQDFRSTGTKIRRKMWLQNMKIKLIVLGILIALILIIVLSVCHGFNCGKK

SEQ ID NO: 171 - DNA, 979 bp, Gossypium hirsutum
  misc_feature: Ceres CLONE ID no.1978977
  misc_feature: Encodes the peptide sequence at SEQ ID NO 172
attttctttttccttttccttttccaaaaacctccgatacttcctctctccctttcctccgattctatatctctctctttctgctagggtttgggagttagtgaagaaggggttgttatttcatggggcaacaatcgttgatctacgccttcgtggcacgaggcaccgtggtcttagccgactatacggagttcaccggaaacttcaccggcatagcttctcagtgtctccagaaacttccttcttcaaacaacaagttcacttacaactgcgatggccatacctttaactatctcgtcgataacggcttcacttattgtgtggttgctattgaatccgttggcagacaggttcctatggcatttcttgagagaattaaagaggatttcaccaagagatatggcggaggaaaagctgcatctgcccctgcaaacagcctgagcaaggagtttgggccaaaattaaaggagcatatgcagtattgcattgatcatcctgaggagatcagtaagattgccaaagtgaaagctcaagtttcagaagttaaaggagttatgatggaaaacattgagaaggttctggaccgtggtgagagaattgagcttctggtggatagaacagaaaatcttcgttctcaggcacaagattttcggcagcagggaacccagatgaggagaaagatgtggttacagaacatgaaggtaaagcttatagttctcggaatcttggtcgctttgatcctcatcattgtactgtctgtttgtcacggcttcaaatgttcatgaattgcatgtccgctctacattccatcggcaactcccagatcagaattattgcaatcacaagtaatgtctaatgcttcttctagttagatttcttttctttttttgtgaaattacatgtgggtcatgtataaccatatcagaagactgcatttagaatataagtttgtgtttctgaaaaaaaaaaaaaaaaaaaa

SEQ ID NO: 172 - protein, 220 aa, Gossypium hirsutum
  misc_feature: Ceres CLONE ID no.1978977
  misc_feature: Bit score of 173.6 for HMM based on sequences of FIGURE 13.
  misc_feature (127)..(215): Pfam Name: Synaptobrevin Pfam Description: Synaptobrevin
  misc_feature: Functional Homolog Of Ceres CLONE ID no. 41543 at SEQ ID NO. 160
MGQQSLIYAFVARGTVVLADYTEFTGNFTGIASQCLQKLPSSNNKFTYNCDGHTFNYLVDNGFTYCVVAIESVGRQVPMAFLERIKEDFTKRYGGGKAASAPANSLSKEFGPKLKEHMQYCIDHPEEISKIAKVKAQVSEVKGVMMENIEKVLDRGERIELLVDRTENLRSQAQDFRQQGTQMRRKMWLQNMKVKLIVLGILVALILIIVLSVCHGFKCS

SEQ ID NO: 173 - DNA, 1308 bp, Gossypium hirsutum
  misc_feature: Ceres CLONE ID no.1918742
  misc_feature: Encodes the peptide sequence at SEQ ID NO 174
agagtctacaacttcttcagctttgaaatattacctccacctccactcctctcctctcccattttatttctaaatatgtaactttttaattttaattttaattttaattgcagaaaagaattagtactcacaaaattaactacatttaccgcaatttcagcatttcgtcgttaatcctattttcttgtccgatcccatcccatccagactcttcactctctttcctttaatctgttttcattttctgtcatttgcaaattgaatttttggttcttgagttctaggtttagggttttgagagatggggcaacagacgttgatctacagctttgtggctcgtggcatggtgatcctcgctgagtataccgagttcaccggtaacttcacaagcattgccggtcaatgtctccagaagctcccttcttccaacaacaaatttacctacaattgcgatggccacaccttcaattatctcgttgagaatggattcacctactgtgtggttgcagttgaatctgctggcaggcaaattccaattgcatttctggaaagaattaaagaagacttcagcagaagatacggtggagggaaggctgcaactgctactgccaagagcctgaatagagaatttaagtccaaattgaaggagcatatgaagtattgtgtggaacatcctgaagagatcagcaaacttgccaaagtgaaggcccaagtttctgaagtcaagggtgttatgatggaaaatattgagaaggtacttgaccgtggtgagaagattgagttgctggtggataaaactgaaaaccttcgttcacaggcacaagattttaggcagcagggaactaagataaaaagaaagatgtggattgagaacatgaagatgaaattgattgtgttcgggatcgttcttgccttggttcttataattgtgctgtcagtctgccctggcttcaaatgttaaaaactgtgaggatagccatccctggtacagctgttgttgcgatgatgccaactgggttgtcttgatagacgatgggtctatataaattcatttatttgtttagttcacatatatttctccctttgctagccgtttaggacagggagaggcttctgcatctcggttgtctgtgtgtataggatttagttgggaacttatcacggtagataaatgtttctatcatttattttcttctttatgtgttgtgtaaggagaaatactcagatgcctgcttatcctatttgccccttccaaatattataaaaaatcattcttctttctgttatcaaaaaaaaaaaaaaaaaaaa

SEQ ID NO: 174 - protein, 219 aa, Gossypium hirsutum
  misc_feature: Ceres CLONE ID no.1918742
  misc_feature: Bit score of 158.5 for HMM based on sequences of FIGURE 13.
  misc_feature (127)..(215): Pfam Name: Synaptobrevin Pfam Description: Synaptobrevin
  misc_feature: Functional Homolog Of Ceres CLONE ID no. 41543 at SEQ ID NO. 160
MGQQTLIYSFVARGMVILAEYTEFTGNFTSIAGQCLQKLPSSNNKFTYNCDGHTFNYLVENGFTYCVVAVESAGRQIPIAFLERIKEDFSRRYGGGKAATATAKSLNREFKSKLKEHMKYCVEHPEEISKLAKVKAQVSEVKGVMMENIEKVLDRGEKIELLVDKTENLRSQAQDFRQQGTKIKRKMWIENMKMKLIVFGIVLALVLIIVLSVCPGFKC

SEQ ID NO: 175 - DNA, 1262 bp, Gossypium hirsutum
  misc_feature: Ceres CLONE ID no.1940023
  misc_feature: Encodes the peptide sequence at SEQ ID NO 176
aaaaataaaacaggtcttgattttaagataatcaacgaattagagcgaaaagtttaagaaatttaaactaattgtctttcccaaaatgctttgtaatgtattttgtggctaacccctaaagttttgcttaagcatcattcaattaaactcctttttcactttttcttatttcttttaagaaaagccaacaaatgagttattcttgagagaagaaagtggaaagcagtagtacgagaaagagagagcctctgaaatcccagatctctctttggaacccaaatttctaaggaaaatggtgcacaaatcattgatctatgcatttgtatctcgtggggaagttatcttagcagagtatactgaattcagtgggaatttcaattccatagcttttcaatgcctccaaaagcttccttcttctttctacgacaagttcacttacaactgtgatggccacaccttcaattaccttgttgacaatggctacacatattgtgttgttgcagatgaattggctggaaggcaagtaccgattgcttttttggagcgtgtcaaggaggactttgtgtcaaaatatggtagtggaaaggctgctactgctcctgccaacagcctgaacaaggaatttgggccaaaactaaaagaacatatgcagtattgtgttgagcatcctgaagaaataagcaagcttgctaagatcaaatctcaggtttctgaagtcaaaggtgttatgatggagaacatagagaaggtgttggatagaggggaaaagatagagcttctagtggataaaactgagaatcttcatcagcaggctcaagacttctggaatactgggacgaaaatccgaagaaaaatgtggctacaaaacatgaagatcaagctgattgttctaggaatattgattgcattgatcctcatcattgtcctctctgtttgccatggtttcaactatggtggaaaatgagtgccatctttattaggcttattattagagttttcaccagagctattatgataatattgtgatgaaaagatcaaaaaatatataatatgatgtcatatgctatatataagattagcaatcaccagatgtttggtgcaagatatttttggatgtgagcaaaccctgtaagtgcttattgcaatacatgaaattgttttctgcaacaatcagattattcatcttcatgcttcagagtcggtaggtaaaattttattcaagacaggaacttgttggatgctaaaaaaaaaaaaaaaaaaaa

SEQ ID NO: 176 - protein, 223 aa, Gossypium hirsutum
  misc_feature: Ceres CLONE ID no.1940023
  misc_feature: Bit score of 154.4 for HMM based on sequences of FIGURE 13.
  misc_feature (128)..(216): Pfam Name: Synaptobrevin Pfam Description: Synaptobrevin
  misc_feature: Functional Homolog Of Ceres CLONE ID no. 41543 at SEQ ID NO. 160
MVHKSLIYAFVSRGEVILAEYTEFSGNFNSIAFQCLQKLPSSFYDKFTYNCDGHTFNYLVDNGYTYCVVADELAGRQVPIAFLERVKEDFVSKYGSGKAATAPANSLNKEFGPKLKEHMQYCVEHPEEISKLAKIKSQVSEVKGVMMENIEKVLDRGEKIELLVDKTENLHQQAQDFWNTGTKIRRKMWLQNMKIKLIVLGILIALILIIVLSVCHGFNYGGK

SEQ ID NO: 177 - DNA, 1125 bp, Gossypium hirsutum
  misc_feature: Ceres CLONE ID no.1923495
  misc_feature: Encodes the peptide sequence at SEQ ID NO 178
attgaaactggaggctggatggagcaaactttttgggcaagttgcttaatagtttttcctaatccaaaggtggtttaagagagcttcagtaatggcccaaggtttagggttttgagagatggggcaacagacgttgatctacagctttgtggctcgtggcatggtgatcctcgctgagtataccgagttcaccggtaacttcacaagcattgccggtcaatgtctccagaagctcccttcttccaacaacaaatttacctacaattgcgatggccacaccttcaattatctcgttgagaatggatccacctactgtgtggttgcagttgaatctgctggcaggcaaattccaattgcatttctggaaagaattaaagaagacttcagcagaagatacggtggagggaaggctgcaactgctactgccaagagcctgaatagagaatttaagtccaaattgaaggagcatatgaagtattgtgtggaacatcctgaagagatcagcaaacttgccaaagtgaaggcccaagtttctgaagtcaagggtgttatgatggaaaatattgagaaggtacttgaccgtggtgagaagattgagttgctggtggataaaactgaaaaccttcgttcacaggcacaagattttaggcagcagggaactaagataaaaagaaagatgtggattgagaacatgaagatgaaattgattgtgttcgggatcgttcttgccttggttcttataattgtgctgtcagtctgccctggcttcaaatgttaaaaactgtgaggatagccatccctggtacagctgttgttgcgatgatgccaactgggttgtcttgatagacgatgggtctatataaattcatttatttgtttagttcacatatatttctccctttgctagccgtttaggacagggagaggcttctgcatctcggttgtctgtgtgtataggatttagttgggaacttatcacggtagataaatgtttctatcatttattttcttctttatgtgttgtgtaaggagaaatactcagatgcctgcttatcctatttgccccttccaaatattataaaaaatcattcttctttctgttatcaaaaaaaaaaaaaaaaaaaa

SEQ ID NO: 178 - protein, 219 aa, Gossypium hirsutum
  misc_feature: Ceres CLONE ID no.1923495
  misc_feature: Bit score of 156.1 for HMM based on sequences of FIGURE 13.
  misc_feature (127)..(215): Pfam Name: Synaptobrevin Pfam Description: Synaptobrevin
  misc_feature: Functional Homolog Of Ceres CLONE ID no. 41543 at SEQ ID NO. 160
MGQQTLIYSFVARGMVILAEYTEFTGNFTSIAGQCLQKLPSSNNKFTYNCDGHTFNYLVENGSTYCVVAVESAGRQIPIAFLERIKEDFSRRYGGGKAATATAKSLNREFKSKLKEHMKYCVEHPEEISKLAKVKAQVSEVKGVMMENIEKVLDRGEKIELLVDKTENLRSQAQDFRQQGTKIKRKMWIENMKMKLIVFGIVLALVLIIVLSVCPGFKC

SEQ ID NO: 179 - protein, 377 aa, Arabidopsis thaliana
  misc_feature: Public GI ID no.15235713
  misc_feature: Bit score of 804.4 for HMM based on sequences of FIGURE 9.
  misc_feature (111)..(355): Pfam Name: Trehalose_PPase Pfam Description: Trehalose-phosphatase
  misc_feature: Functional Homolog Of Ceres SEEDLINE ID no. ME20095 at SEQ ID NO. 1129
MDLNINKTTPVLSDPTTPVSKTRLGSSFPSGRFMMNSRKKIPKLDDVRSNGWLDAMISSSPPRKRLVKDFNIEIAPEDDFSQRAWMLKYPSAITSFAHIAAQAKNKKIAVFLDYDGTLSPIVDDPDRAIMSDAMRAAVKDVAKYFPTAIISGRSRDKVYQLVGLTELYYAGSHGMDIMTPVNPNGSPEDPNCIKTTDQQGEEVNLFQPAKEFIPVIEEVYNNLVEITKCIKGAKVENHKFCTSVHYRNVDEKDWPLVAQRVHDHLKRYPRLRITHGRKVLEVRPVIEWNKGKAVEFLLESLGLSNNDEFLPIFIGDDKTDEDAFKVLREGNRGFGILVSSVPKESNAFYSLRDPSEVKKFLKTLVKWGKMESSKTSF

SEQ ID NO: 180 - protein, 368 aa, Arabidopsis thaliana
  misc_feature: Public GI ID no.15234552
  misc_feature: Bit score of 788.0 for HMM based on sequences of FIGURE 9.
  misc_feature (108)..(346): Pfam Name: Trehalose_PPase Pfam Description: Trehalose-phosphatase
  misc_feature: Functional Homolog Of Ceres SEEDLINE ID no. ME20095 at SEQ ID NO. 1129
MDLNSNHKSSVLKDPSPSVNQSRLGVSSRFMMSQWKKPAKLDDVRSNGWLDAMISSSPPRKKLVKDFNVEVAPEDDFAQRAWMVKYPSAISSFAHIAAQAKKKKIAVFLDYDGTLSPIVDDPDRAIMSDAMRSAVKDVASYFPTAIISGRSRDKVYQLVGLTELYYAGSHGMDIMTSSDGPNCFKSTDQQGKEVNLFQPAREFIPVIDEVFRTLVEKMKDIKGAKVENHKFCASVHYRNVDEKDWPIIAQRVHDHLKQYPRLRLTHGRKVLEVRPVIDWNKGRAVEFLLESLGLSNKDDLLPIYIGDDTTDEDAFKVLRDGNRGFGILVSSIPKESNAFYSLRDPSEVKKFLKTLVKWAKLEKNSTGF

SEQ ID NO: 181 - DNA, 1029 bp, Gossypium hirsutum
  misc_feature: Ceres CLONE ID no.1851388
  misc_feature: Encodes the peptide sequence at SEQ ID NO 182
gtttcaggtaagcttttcttcatctgaacttcctttctttgatgatctaggtacttcagaataccctgctgaaatgaatcaaaagggcttgatttatagttttgttgcaaaaggaactgttgttttagctgagcacacatcatattctgggaactttagtaccattgctgttcaatgtttacagaagctgccttcaaatagcagcaagttcacgtattcttgtgacggtcacacatttaacttcctcattgacaatggatttgtgtttctagttgtcgcagatgaatcagttggcaggagtgtgcctttcgtttttcttgaacgggtgctagatgattttaaacaacgatatggtgcaagtataagaaatgagggtccccatcctttagctgatgatgacgatgatgacgacttatttgaggaccaatttagcattgcatataatcttgacagagaatttggaccaaggcttaaggagcacatgcaatattgtatgaaccatccagaagaaatgagtaagctctcgaagttaaaagctcaaatcactgaggtgaaggggattatgatggataacattgagaaggttttggatcgcggggagaagattgaacttctagtggacaaaactgagaacttacaattccaggctgatagcttccagaggcaagggcggcaactgcggcggaggatgtggctgcagaatctgcaaatgaaactgatggtggggggagctattcttgtgttgatcatccttttgtgggtttttgcgtgtggaggtttcaaatgttaacgttgataaccattgcattgcctatgttttcttttatatatacaaaaaataataattctacatttgtttagatgtacaaaatatagttatgctcttgactttgtacatggattgctgttgttatgtagcactaccttgccgtttaagatatgtaatcaaagctttgaattttatacttttttgaagttttctatatgaatgttttttacttgtaaaaaaaaaaaaaaaaaaaaaaaaaa

SEQ ID NO: 182 - protein, 238 aa, Gossypium hirsutum
  misc_feature: Ceres CLONE ID no.1851388
  misc_feature: Bit score of 164.3 for HMM based on sequences of FIGURE 13.
  misc_feature (146)..(234): Pfam Name: Synaptobrevin Pfam Description: Synaptobrevin
  misc_feature: Functional Homolog Of Ceres CLONE ID no. 41543 at SEQ ID NO. 160
MNQKGLIYSFVAKGTVVLAEHTSYSGNFSTIAVQCLQKLPSNSSKFTYSCDGHTFNFLIDNGFVFLVVADESVGRSVPFVFLERVLDDFKQRYGASIRNEGPHPLADDDDDDDLFEDQFSIAYNLDREFGPRLKEHMQYCMNHPEEMSKLSKLKAQITEVKGIMMDNIEKVLDRGEKIELLVDKTENLQFQADSFQRQGRQLRRRMWLQNLQMKLMVGGAILVLIILLWVFACGGFKC

SEQ ID NO: 183 - DNA, 663 bp, Populus balsamifera subsp. trichocarpa
  misc_feature: Ceres ANNOT ID no.1531178
  misc_feature: Encodes the peptide sequence at SEQ ID NO 184
atggcgatcctgtacgcgctagtggcgaggggatctgtggtgctagcggagtttacctcgacggcgacaaacgcaagcgcgattgctcggcaaatattggacaagataccaggcaatgatgatagcaacgtctcttactctcaagatcgttatatttttcacgttaaacgcaccgatggccttaccgttctctgtatggccgatgaaaccgccggcagaagaattccctttgcgtttctcgaggacattcatcagagatttgtgaggacgtatggtcgtgcagttattacagctcaagcttatgccatgaatgatgagttctcaagagttttgagccagcaaatggagtactatactaacgatcctaatgcagataggataaatagactgaaaggtgaaatgagtcaggtgagaaatgtcatgattgagaacattgacaaagttttggagagaggtgatcgcttggaattgctggttgataaaacagctaacatgcaaggaaacaccttccgtttcagaaagcaagctcgtcgtttcagaagcactgtatggtggagaaatgttaagcttacggttgctttgattttattactactagtgatcatctatgttgtgctggcttttgtatgccatggacttacactacctacgtgcctaaagtaa

SEQ ID NO: 184 - protein, 220 aa, Populus balsamifera subsp. trichocarpa
  misc_feature: Ceres ANNOT ID no.1531178
  misc_feature: Bit score of 663.4 for HMM based on sequences of FIGURE 13.
  misc_feature (123)..(211): Pfam Name: Synaptobrevin Pfam Description: Synaptobrevin
  misc_feature: Functional Homolog Of Ceres CLONE ID no. 41543 at SEQ ID NO. 160
MAILYALVARGSVVLAEFTSTATNASAIARQILDKIPGNDDSNVSYSQDRYIFHVKRTDGLTVLCMADETAGRRIPFAFLEDIHQRFVRTYGRAVITAQAYAMNDEFSRVLSQQMEYYTNDPNADRINRLKGEMSQVRNVMIENIDKVLERGDRLELLVDKTANMQGNTFRFRKQARRFRSTVWWRNVKLTVALILLLLVIIYVVLAFVCHGLTLPTCLK

SEQ ID NO: 185 - DNA, 783 bp, Populus balsamifera subsp. trichocarpa
  misc_feature: Ceres ANNOT ID no.1477681
  misc_feature: Encodes the peptide sequence at SEQ ID NO 186
atggcgatcctgtacgcgctagtggcgaggggatctgtggtgctagcggagtttacctcgacggcgacaaacgcaagcgcgattgctcggcaaatattggacaagataccaggcaatgatgatagcaacgtctcttactctcaagatcgttatatttttcacgttaaacgcaccgatggccttaccgttctctgtatggccgatgaaaccgccggcagaagaattccctttgcgtttctcgaggacattcatcagagatttgtgaggacgtatggtcgtgcagttattacagctcaagcttatgccatgaatgatgagttctcaagagttttgagccagcaaatggagtactatactaacgatcctaatgcagataggataaatagactgaaaggtgaaatgagtcaggtgagaaatgtcatgattgagaacattgacaaagttttggagagaggtgatcgcttggaattgctggttgataaaacagctaacatgcaaggaaacaccttccgtttcagaaagcaagctcgtcgtttcagaagcactgtatggtggagaaatgttaagcttacggttgctttgattttattactactagtgatcatctatgttgtgctggcttttgtatgccatggacttacactacctacgtgcctaaaccatcatgggattcacccctcagcctcctttgacttaatccctagttactacgaagaaaaggtctttcggagggacttgggacgaatgaggaatgggtctttgttagttactggtcatggctga

SEQ ID NO: 186 - protein, 260 aa, Populus balsamifera subsp. trichocarpa
  misc_feature: Ceres ANNOT ID no.1477681
  misc_feature: Bit score of 661.9 for HMM based on sequences of FIGURE 13.
  misc_feature (123)..(211): Pfam Name: Synaptobrevin Pfam Description: Synaptobrevin
  misc_feature: Functional Homolog Of Ceres CLONE ID no. 41543 at SEQ ID NO. 160
MAILYALVARGSVVLAEFTSTATNASAIARQILDKIPGNDDSNVSYSQDRYIFHVKRTDGLTVLCMADETAGRRIPFAFLEDIHQRFVRTYGRAVITAQAYAMNDEFSRVLSQQMEYYTNDPNADRINRLKGEMSQVRNVMIENIDKVLERGDRLELLVDKTANMQGNTFRFRKQARRFRSTVWWRNVKLTVALILLLLVIIYVVLAFVCHGLTLPTCLNHHGIHPSASFDLIPSYYEEKVFRRDLGRMRNGSLLVTGHG

SEQ ID NO: 187 - DNA, 663 bp, Populus balsamifera subsp. trichocarpa
  misc_feature: Ceres ANNOT ID no.1508800
  misc_feature: Encodes the peptide sequence at SEQ ID NO 188
atggcgatcctgtacgcgctagtggcaaggggatcggtggtgctagcggagtttagctctacagcaacgaacgcaagcgcgattgctaggcaaatactggataagatacctggcaatgatgatagcaatgtctcttactctcaagatcgttatatttttcatgttaaacgcaccgatggcctcgccgttctttgcatggccgatgaaaccgccggcagaagaattccgtttgcatttcttgaggacattcatcagagatttgccaggacttatggacgtgcagttattacagctcaagcttatgccatgaatgatgaattctcaagagttttgagccaacaaatggagtactacactaatgatccgaatgcagataggataaatagactgaaaggtgaaatgagccaggtgcgaaatgttatgattgagaacattgacaaagttttggagagaggtgatcgcttggaattgctggtagataaaaccgccaacatgcaaggaaacaccttccgtttcagaaagcaagctcgtcgtttcagcagcgcagtatggtggagaaatgtcaagctcacggttgctttgattttactactactagtgattatctacgttgtgctggccgttgtatgccatggagttacactgcctacatgccgaaagtaa

SEQ ID NO: 188 - protein, 220 aa, Populus balsamifera subsp. trichocarpa
  misc_feature: Ceres ANNOT ID no.1508800
  misc_feature: Bit score of 643.2 for HMM based on sequences of FIGURE 13.
  misc_feature (123)..(211): Pfam Name: Synaptobrevin Pfam Description: Synaptobrevin
  misc_feature: Functional Homolog Of Ceres CLONE ID no. 41543 at SEQ ID NO. 160
MAILYALVARGSVVLAEFSSTATNASAIARQILDKIPGNDDSNVSYSQDRYIFHVKRTDGLAVLCMADETAGRRIPFAFLEDIHQRFARTYGRAVITAQAYAMNDEFSRVLSQQMEYYTNDPNADRINRLKGEMSQVRNVMIENIDKVLERGDRLELLVDKTANMQGNTFRFRKQARRFSSAVWWRNVKLTVALILLLLVIIYVVLAVVCHGVTLPTCRK

SEQ ID NO: 189 - DNA, 738 bp, Populus balsamifera subsp. trichocarpa
  misc_feature: Ceres ANNOT ID no.1455597
  misc_feature: Encodes the peptide sequence at SEQ ID NO 190
atggcgatcctgtacgcgctagtggcaaggggatcggtggtgctagcggagtttagctctacagcaacgaacgcaagcgcgattgctaggcaaatactggataagatacctggcaatgatgatagcaatgtctcttactctcaagatcgttatatttttcatgttaaacgcaccgatggcctcgccgttctttgcatggccgatgaaaccgccggcagaagaattccgtttgcatttcttgaggacattcatcagagatttgccaggacttatggacgtgcagttattacagctcaagcttatgccatgaatgatgaattctcaagagttttgagccaacaaatggagtactacactaatgatccgaatgcagataggataaatagactgaaaggtgaaatgagccaggtgcgaaatgttatgattgagaacattgacaaagttttggagagaggtgatcgcttggaattgctggtagataaaaccgccaacatgcaaggaaacaccttccgtttcagaaagcaagctcgtcgtttcagcagcgcaggttgctttgattttactactactagtgattatctacgttgtgctggccgttgtatgccatggagttacactgcctacatgccgaaatattatcgacgggaagggagaggggaggcgcctgtcaagtttccagaatcttgtttatttttcttctctgattccattcagaaagatgcatcttctgtggaatga

SEQ ID NO: 190 - protein, 245 aa, Populus balsamifera subsp. trichocarpa
  misc_feature: Ceres ANNOT ID no.1455597
  misc_feature: Bit score of 499.2 for HMM based on sequences of FIGURE 13.
  misc_feature (123)..(179): Pfam Name: Synaptobrevin Pfam Description: Synaptobrevin
  misc_feature: Functional Homolog Of Ceres CLONE ID no. 41543 at SEQ ID NO. 160
MAILYALVARGSVVLAEFSSTATNASAIARQILDKIPGNDDSNVSYSQDRYIFHVKRTDGLAVLCMADETAGRRIPFAFLEDIHQRFARTYGRAVITAQAYAMNDEFSRVLSQQMEYYTNDPNADRINRLKGEMSQVRNVMIENIDKVLERGDRLELLVDKTANMQGNTFRFRKQARRFSSAGCFDFTTTSDYLRCAGRCMPWSYTAYMPKYYRREGRGEAPVKFPESCLFFFSDSIQKDASSVE

SEQ ID NO: 191 - DNA, 873 bp, Populus balsamifera subsp. trichocarpa
  misc_feature: Ceres ANNOT ID no.1532016
  misc_feature: Encodes the peptide sequence at SEQ ID NO 192
atggggatattgtatggcatggtggcaagaggtcctgtggtcttggcagaatttagcagcattgcacaaacaaatgcaaacaccgtagcaaggcagattcttgataaaatccctcgtggaaatgaagatagtaattcatcgtattctcatgatcgttacatttttcatgttaaaagaaccgatgaccttaccgttctttgcatggctgatgatgccaccggacggagaatcccatttgaatttctcgaggacattcatcaaagatttgtgaagacatacggccgtgcaattcatacatctgctccctatgccatgaatgaagagttttccaggatcatgagccaacagatggaccatttttcaaatgatccgaatgcggatcgattgaaccgtttacagggtgaaatgagtcatgtaaggagtgtcatgatcgacaacattgacaaagtgttgcagaggggagatcggctggcgctgctagttgaaaaaacttccacattgcaaggaaatacaattcgctttcggcgacagactcagcgtttcagaaatacacagtggtggagaaatttcaagctcaaactttgtacttgcttcggatgtgcatttgttgaccatgttgtgcttaagaaggaatggaatttgcacaaggacaacctgggtttcacactggactcaagttatctgcagattactagttctcatggtagacaaatggaggacatgttttctctgtcccgagattacaaaactctacctaagagatgtcgtgttttatcatccatggctacattgatactatttctcttgattttcatttatactgtactcgcattgttttgtcacggcccttcacttcattcctgcttgaagtag

SEQ ID NO: 192 - protein, 290 aa, Populus balsamifera subsp. trichocarpa
  misc_feature: Ceres ANNOT ID no.1532016
  misc_feature: Bit score of 461.4 for HMM based on sequences of FIGURE 13.
  misc_feature (125)..(195): Pfam Name: Synaptobrevin Pfam Description: Synaptobrevin
  misc_feature: Functional Homolog Of Ceres CLONE ID no. 41543 at SEQ ID NO. 160
MGILYGMVARGPVVLAEFSSIAQTNANTVARQILDKIPRGNEDSNSSYSHDRYIFHVKRTDDLTVLCMADDATGRRIPFEFLEDIHQRFVKTYGRAIHTSAPYAMNEEFSRIMSQQMDHFSNDPNADRLNRLQGEMSHVRSVMIDNIDKVLQRGDRLALLVEKTSTLQGNTIRFRRQTQRFRNTQWWRNFKLKLCTCFGCAFVDHVVLKKEWNLHKDNLGFTLDSSYLQITSSHGRQMEDMFSLSRDYKTLPKRCRVLSSMATLILFLLIFIYTVLALFCHGPSLHSCLK

SEQ ID NO: 193 - DNA, 915 bp, Populus balsamifera subsp. trichocarpa
  misc_feature: Ceres ANNOT ID no.1478526
  misc_feature: Encodes the peptide sequence at SEQ ID NO 194
atggggatattgtatggcatggtggcaagaggtcctgtggtcttggcagaatttagcagcattgcacaaacaaatgcaaacaccgtagcaaggcagattcttgataaaatccctcgtggaaatgaagatagtaattcatcgtattctcatgatcgttacatttttcatgttaaaagaaccgatgaccttaccgttctttgcatggctgatgatgccaccggacggagaatcccatttgaatttctcgaggacattcatcaaagatttgtgaagacatacggccgtgcaattcatacatctgctccctatgccatgaatgaagagttttccaggatcatgagccaacagatggaccatttttcaaatgatccgaatgcggatcgattgaaccgtttacagggtgaaatgagtcatgtaaggagtgtcatgatcgacaacattgacaaagtgttgcagaggggagatcggctggcgctgctagttgaaaaaacttccacattgcaaggaaatacaattcgctttcggcgacagactcagcgtttcagaaatacacagtggtggagaaatttcaagctcaaactttgtacttgcttcggatgtgcatttgttgaccatgttgtgcttaagaaggaatggaatttgcacaaggacaacctgggtttcacactggactcaagttatctgcagattactagttctcatggtagacaaatggaggacatgttttctctgtcccgagattacaaaactctacctaagagatgtcgtgttttatcatccattcaaagcccgtttttacttgcaacgggcggccttggagaggatctggaaactagtattggacgcaagcgcaaggcctttatatgtgtgtctagcgcccagctccttgcacctaccctgcaccccgcgtcctag

SEQ ID NO: 194 - protein, 304 aa, Populus balsamifera subsp. trichocarpa
  misc_feature: Ceres ANNOT ID no.1478526
  misc_feature: Bit score of 461.4 for HMM based on sequences of FIGURE 13.
  misc_feature (125)..(195): Pfam Name: Synaptobrevin Pfam Description: Synaptobrevin
  misc_feature: Functional Homolog Of Ceres CLONE ID no. 41543 at SEQ ID NO. 160
MGILYGMVARGPVVLAEFSSIAQTNANTVARQILDKIPRGNEDSNSSYSHDRYIFHVKRTDDLTVLCMADDATGRRIPFEFLEDIHQRFVKTYGRAIHTSAPYAMNEEFSRIMSQQMDHFSNDPNADRLNRLQGEMSHVRSVMIDNIDKVLQRGDRLALLVEKTSTLQGNTIRFRRQTQRFRNTQWWRNFKLKLCTCFGCAFVDHVVLKKEWNLHKDNLGFTLDSSYLQITSSHGRQMEDMFSLSRDYKTLPKRCRVLSSIQSPFLLATGGLGEDLETSIGRKRKAFICVSSAQLLAPTLHPAS

SEQ ID NO: 195 - DNA, 729 bp, Populus balsamifera subsp. trichocarpa
  misc_feature: Ceres ANNOT ID no.1492567
  misc_feature: Encodes the peptide sequence at SEQ ID NO 196
atggcgatcatttatgcggtagtggcgaggggaacggtggtgctgtctgagttcagcgcggtgacgggaaacacaggagcggtggcgagacggatcctggagaagcttccatcggaagctgattcaaggctttgcttctcgcaagatcgttacatatttcacatactcagatccgatggcctcacttttctctgtatggcaaacgacaccttcggcaggaggattccgtttacgtacttggaggacattcacatgaggttcatgaaaaactatggacgagttgctcactatgcgccagcctatgcaatgaatgatgagttctcaagggtcctgcatcagcaaatggaattcttctccagcaatcctagtgctgatactctcagtcgtgtaagaggtgaagttggcgaggcaagagaaaacatcaagcacaacaatcctccaagacagtggcttgaacccaaaagaggggggaatatccgtacaattatggtagaaaacatcgagaaaatacttgagagaggtgaccgaattgagcttcttgttgacaaaacagcaacgatgcaagatggtgcatttcacttcaagaaacagtccaagggccttcgaagagctctctggatgaagaatgctaagctcttggccctgctgacatgcgtgattgttttgttgctgtacataataattgctgcttgttgtggaggcatcactctaccttcatgcagatcttga

SEQ ID NO: 196 - protein, 242 aa, Populus balsamifera subsp. trichocarpa
  misc_feature: Ceres ANNOT ID no.1492567
  misc_feature: Bit score of 526.6 for HMM based on sequences of FIGURE 13.
  misc_feature (159)..(233): Pfam Name: Synaptobrevin Pfam Description: Synaptobrevin
  misc_feature: Functional Homolog Of Ceres CLONE ID no. 41543 at SEQ ID NO. 160
MAIIYAVVARGTVVLSEFSAVTGNTGAVARRILEKLPSEADSRLCFSQDRYIFHILRSDGLTFLCMANDTFGRRIPFTYLEDIHMRFMKNYGRVAHYAPAYAMNDEFSRVLHQQMEFFSSNPSADTLSRVRGEVGEARENIKHNNPPRQWLEPKRGGNIRTIMVENIEKILERGDRIELLVDKTATMQDGAFHFKKQSKGLRRALWMKNAKLLALLTCVIVLLLYIIIAACCGGITLPSCRS

SEQ ID NO: 197 - DNA, 726 bp, Populus balsamifera subsp. trichocarpa
  misc_feature: Ceres ANNOT ID no.1515273
  misc_feature: Encodes the peptide sequence at SEQ ID NO 198
atggcgattatttatgcggttgtggcgcgggggacggtggtgctgtcagagttcagcgctgtgaccggaaactcaggggcggtggcgagacggatcctggagaagcttccatcggaagctgattcaagactttgcttctcgcaagatcgttacatattccacatacttagatccgacggcctcacttatctctgtatggccaacgacaccttcggcaggagaattccattttcctacttggaggacattcagatgaggttcatgaaaaattatggacgagttgcccaccatgcacctgcttatgcagtgaatgatgagttttctagggttttgcatcagcaaatggagtttttctccagcaaccctagtgctgatactctgagtcgtatccgtactatcatggtagaaaacattgaaaaaatactcgaaagaggtgaccgaattgagcttctcgttgacaaaactgctacaatgcaagatggtgcttttcatttcaagaaacagtccaagcgcctacgaagagctctttggatgaaaaatgccaagctcttgagtaatctggaatttgctagggaaaagggcagttttaggctagaaaatgtgagaagtagaaaaaggaaggacctctcaatgggggccctgctgacatgcgtgattgtcttgttgctgtacataataattgctgcttgttgtggcggcatcactctaccttcatgcagatcttga

SEQ ID NO: 198 - protein, 241 aa, Populus balsamifera subsp. trichocarpa
  misc_feature: Ceres ANNOT ID no.1515273
  misc_feature: Bit score of 484.3 for HMM based on sequences of FIGURE 13.
  misc_feature (130)..(183): Pfam Name: Synaptobrevin Pfam Description: Synaptobrevin
  misc_feature: Functional Homolog Of Ceres CLONE ID no. 41543 at SEQ ID NO. 160
MAIIYAVVARGTVVLSEFSAVTGNSGAVARRILEKLPSEADSRLCFSQDRYIFHILRSDGLTYLCMANDTFGRRIPFSYLEDIQMRFMKNYGRVAHHAPAYAVNDEFSRVLHQQMEFFSSNPSADTLSRIRTIMVENIEKILERGDRIELLVDKTATMQDGAFHFKKQSKRLRRALWMKNAKLLSNLEFAREKGSFRLENVRSRKRKDLSMGALLTCVIVLLLYIIIAACCGGITLPSCRS

SEQ ID NO: 199 - DNA, 810 bp, Populus balsamifera subsp. trichocarpa
  misc_feature: Ceres ANNOT ID no.1461979
  misc_feature: Encodes the peptide sequence at SEQ ID NO 200
atggcgattatttatgcggttgtggcgcgggggacggtggtgctgtcagagttcagcgctgtgaccggaaactcaggggcggtggcgagacggatcctggagaagcttccatcggaagctgattcaagactttgcttctcgcaagatcgttacatattccacatacttagatccgacggcctcacttatctctgtatggccaacgacaccttcggcaggagaattccattttcctacttggaggacattcagatgaggttcatgaaaaattatggacgagttgcccaccatgcacctgcttatgcagtgaatgatgagttttctagggttttgcatcagcaaatggagtttttctccagcaaccctagtgctgatactctgagtcgtatccgtactatcatggtagaaaacattgaaaaaatactcgaaagaggtgaccgaattgagcttctcgttgacaaaactgctacaatgcaagatggtgcttttcatttcaagaaacagtccaagcgcctacgaagagctctttggatgaaaaatgccaagctcttgagtaatctggaatttgctagggaaaagggcagttttaggctagaaaatgtgagaagtagaaaaaggaaggacctctcaatggggagtaccctggagttttctagggaaaagggcagttttaggctagaaaaaggccctgctgacatgcgtgattgtcttgttgctgtacataataattgctgcttgttgtggcggcatcactctaccttcatgcagatcttgagatgctgtttcgctggtgctgaatttaccctctga

SEQ ID NO: 200 - protein, 269 aa, Populus balsamifera subsp. trichocarpa
  misc_feature: Ceres ANNOT ID no.1461979
  misc_feature: Bit score of 437.1 for HMM based on sequences of FIGURE 13.
  misc_feature (130)..(183): Pfam Name: Synaptobrevin Pfam Description: Synaptobrevin
  misc_feature: Functional Homolog Of Ceres CLONE ID no. 41543 at SEQ ID NO. 160
MAIIYAVVARGTVVLSEFSAVTGNSGAVARRILEKLPSEADSRLCFSQDRYIFHILRSDGLTYLCMANDTFGRRIPFSYLEDIQMRFMKNYGRVAHHAPAYAVNDEFSRVLHQQMEFFSSNPSADTLSRIRTIMVENIEKILERGDRIELLVDKTATMQDGAFHFKKQSKRLRRALWMKNAKLLSNLEFAREKGSFRLENVRSRKRKDLSMGSTLEFSREKGSFRLEKGPADMRDCLVAVHNNCCLLWRHHSTFMQILRCCFAGAEFTL

SEQ ID NO: 201 - DNA, 804 bp, Populus balsamifera subsp. trichocarpa
  misc_feature: Ceres ANNOT ID no.1439702
  misc_feature: Encodes the peptide sequence at SEQ ID NO 202
atggcgatcatttatgcggtagtggcgaggggaacggtggtgctgtctgagttcagcgcggtgacgggaaacacaggagcggtggcgagacggatcctggagaagcttccatcggaagctgattcaaggctttgcttctcgcaagatcgttacatatttcacatactcagatccgatggcctcacttttctctgtatggcaaacgacaccttcggcaggaggattccgtttacgtacttggaggacattcacatgaggttcatgaaaaactatggacgagttgctcactatgcgccagcctatgcaatgaatgatgagttctcaagggtcctgcatcagcaaatggaattcttctccagcaatcctagtgctgatactctcagtcgtgtaagaggtgaagttggcgaggcaagagaaaacatcaagcacaacaatcctccaagacagtggcttgaacccaaaagaggggggaatatccgtacaattatggtagaaaacatcgagaaaatacttgagagaggtgaccgaattgagcttcttgttgacaaaacagcaacgatgcaagatggtgcatttcacttcaagaaacagtccaagggccttcgaagagctctctggatgaagaatgctaagctctttttttgttcattgatgctaaaagatttttcttactgcattaaatttctaaatttggaagttgctagagaaaacagcagtttaaggccagaaaatgtgagaagtcgaaaaaggaaaaattggcttatttccatctctagatgcaaaaagaatccatatgctctttaa

SEQ ID NO: 202 - protein, 267 aa, Populus balsamifera subsp. trichocarpa
  misc_feature: Ceres ANNOT ID no.1439702
  misc_feature: Bit score of 443.8 for HMM based on sequences of FIGURE 13.
  misc_feature (159)..(212): Pfam Name: Synaptobrevin Pfam Description: Synaptobrevin
  misc_feature: Functional Homolog Of Ceres CLONE ID no. 41543 at SEQ ID NO. 160
MAIIYAVVARGTVVLSEFSAVTGNTGAVARRILEKLPSEADSRLCFSQDRYIFHILRSDGLTFLCMANDTFGRRIPFTYLEDIHMRFMKNYGRVAHYAPAYAMNDEFSRVLHQQMEFFSSNPSADTLSRVRGEVGEARENIKHNNPPRQWLEPKRGGNIRTIMVENIEKILERGDRIELLVDKTATMQDGAFHFKKQSKGLRRALWMKNAKLFFCSLMLKDFSYCIKFLNLEVARENSSLRPENVRSRKRKNWLISISRCKKNPYAL

SEQ ID NO: 203 - DNA, 660 bp, Populus balsamifera subsp. trichocarpa
  misc_feature: Ceres ANNOT ID no.1448044
  misc_feature: Encodes the peptide sequence at SEQ ID NO 204
atggggcaacaatcattgatctatagctttgtggcaagaggaactgtgattcttgcggagtacacggagtttaaaggcaatttcactggcatcgctgcacaatgtcttcaaaaacttcccgcttccaataacaagtttacttataattgcgatggccataccttcaattacctcgttgaagatggattcacctactgcgtggttgcagttgaatccgctggcagacaaatcccaattgcctttttggagcgagttaaggaagattttaacaaaagatatggtggaggaaaagcagcaacggctgttgccaatagcctgaacagagagtttgggtccaagttgaaggagcacatgcagtattgtgtggatcatcctgaagagatcagcaagcttgcaaaagttaaggctcaggtttctgaagttaagggtgttatgatggaaaacattgagaaggttcttgatcgtggagagaagattgagctgctggtggataaaactgagaaccttcgctcacaggcacaagatttccgacaacagggaactaagatgagaagaaagatgtggattcagaatatgaagatgaaattgattgttttgggtattatcattgccttgattctcatcatagtgttatccgtgtgccatggcttcaattgttaa

SEQ ID NO: 204 - protein, 219 aa, Populus balsamifera subsp. trichocarpa
  misc_feature: Ceres ANNOT ID no.1448044
  misc_feature: Bit score of 178.2 for HMM based on sequences of FIGURE 13.
  misc_feature (127)..(215): Pfam Name: Synaptobrevin Pfam Description: Synaptobrevin
  misc_feature: Functional Homolog Of Ceres CLONE ID no. 41543 at SEQ ID NO. 160
MGQQSLIYSFVARGTVILAEYTEFKGNFTGIAAQCLQKLPASNNKFTYNCDGHTFNYLVEDGFTYCVVAVESAGRQIPIAFLERVKEDFNKRYGGGKAATAVANSLNREFGSKLKEHMQYCVDHPEEISKLAKVKAQVSEVKGVMMENIEKVLDRGEKIELLVDKTENLRSQAQDFRQQGTKMRRKMWIQNMKMKLIVLGIIIALILIIVLSVCHGFNC

SEQ ID NO: 205 - DNA, 666 bp, Populus balsamifera subsp. trichocarpa
  misc_feature: Ceres ANNOT ID no.1483370
  misc_feature: Encodes the peptide sequence at SEQ ID NO 206
atgaaccagaaatcactgatttacgcgtttgtttcacgaggaactgtgattcttgctgagttcactgaattcagcgggaatttcaattccatagcgtttcaatgtctccaaaaacttcctgctactaacaacaagtttacttacaactgcgatggtcatactttcaattacctcgccgacaatgggtttacatattgtgttgttgcggatgaatcggctggaagacaagtgcctatggcttttctggagcgtgtcaaggatgatttcgtgtcaaagtatggcggtggaaaggctgccacagcccaggccaatggtcttaacaaggaatttgggccaaaattgaaggaacatatgaagtattgtgctgatcatcctgaagagataagcaagcttgcgaaagtgaaagctcaggtttcagaagttaaaggtgtcatgatggagaacattgagaaggttctggataggggagagaaaatagaacttcttgtggacaagaccgagaaccttcattcacaggcacaagactttcgcagtcaagggacacaaatccggagaaaaatgtggctgcagaacatgaaggttaagctgattgtattgggaatactgattgccttgatcctcatcatagtcctctctgtttgcaaaggctttaattgtggaaaatga

SEQ ID NO: 206 - protein, 221 aa, Populus balsamifera subsp. trichocarpa
  misc_feature: Ceres ANNOT ID no.1483370
  misc_feature: Bit score of 183.2 for HMM based on sequences of FIGURE 13.
  misc_feature (127)..(215): Pfam Name: Synaptobrevin Pfam Description: Synaptobrevin
  misc_feature: Functional Homolog Of Ceres CLONE ID no. 41543 at SEQ ID NO. 160
MNQKSLIYAFVSRGTVILAEFTEFSGNFNSIAFQCLQKLPATNNKFTYNCDGHTFNYLADNGFTYCVVADESAGRQVPMAFLERVKDDFVSKYGGGKAATAQANGLNKEFGPKLKEHMKYCADHPEEISKLAKVKAQVSEVKGVMMENIEKVLDRGEKIELLVDKTENLHSQAQDFRSQGTQIRRKMWLQNMKVKLIVLGILIALILIIVLSVCKGFNCGK

SEQ ID NO: 207 - DNA, 660 bp, Populus balsamifera subsp. trichocarpa
  misc_feature: Ceres ANNOT ID no.1445651
  misc_feature: Encodes the peptide sequence at SEQ ID NO 208
atggggcaacaatcgttgatctatagcttcgtggctcgaggcacggtgattttggctgattacaccgatttctctggtaacttcgcgggcatagccgctcagtgtctccagaaacttcctgcaactaacaacaagttcacttacagctgcgatggccacaccttcaactacctcgtcgataacggcttcacttactgtgtagttgcagtggagtctgtggggcgacagattccgattgcctatctcgagagaatcaaggaggattttaccaacagatatggtggggggaaagctgcaatagcggttgctaatggtctgaagaaggaatttgggccgaagttgaaggagcagatgcagttttgtatggaccatccagaggaagtcagcaagcttgccaaagtgaaagctcaggtttctgaagtgaaaggagttatgatggaaaacatagagaaggttcttgatcggggagagaaaattgaacttctggtagacaaaacagaaaaccttcgctctcaggcacaagttttcaggcagcaagggggccagataaagaggaaaatgtggtggcagaacatgaaaataaagctgatagtgctggcgatcttgattgtcctgattctcatcatagtattgtctatttgtggtggcttcaaatgctga

SEQ ID NO: 208 - protein, 219 aa, Populus balsamifera subsp. trichocarpa
  misc_feature: Ceres ANNOT ID no.1445651
  misc_feature: Bit score of 172.0 for HMM based on sequences of FIGURE 13.
  misc_feature (127)..(215): Pfam Name: Synaptobrevin Pfam Description: Synaptobrevin
  misc_feature: Functional Homolog Of Ceres CLONE ID no. 41543 at SEQ ID NO. 160
MGQQSLIYSFVARGTVILADYTDFSGNFAGIAAQCLQKLPATNNKFTYSCDGHTFNYLVDNGFTYCVVAVESVGRQIPIAYLERIKEDFTNRYGGGKAAIAVANGLKKEFGPKLKEQMQFCMDHPEEVSKLAKVKAQVSEVKGVMMENIEKVLDRGEKIELLVDKTENLRSQAQVFRQQGGQIKRKMWWQNMKIKLIVLAILIVLILIIVLSICGGFKC

SEQ ID NO: 209 - protein, 340 aa, Populus balsamifera subsp. trichocarpa
  misc_feature: Ceres ANNOT ID no.1520801
  misc_feature: Bit score of 491.8 for HMM based on sequences of FIGURE 9.
  misc_feature (73)..(310): Pfam Name: Trehalose_PPase Pfam Description: Trehalose-phosphatase
  misc_feature: Functional Homolog Of Ceres SEEDLINE ID no. ME20095 at SEQ ID NO. 1129
MGFQRSSNRQKVQPGASDLSSNERAPNSCHPVINGSAVSDDANYSSWMVDHPSALTSFDQMMKDAKGKKIVVFLDYDGTLSPIVNDPDRAFMSDEMRAAVREVAKYFPTAIISGRSRDKLNNIYYAGSHGMDIMAPPRPVRSSDGKYHTVSLDRKGNEAVFQPAQKFLPSIQKILKELEEAIMKIQGARVENNRFCVSVHFRQVRDEDYGILEEKVKSILKHYPDFRLGWGKKVMEIRPSIEWDKGNALEYLLDTLGLGNCTDVLPVYIGDDRTDEDAFKVIQKRGQGYPIVVASSPKDTKASYSLHDPSEVLTFLLRLARWRKASSSSRSLSQIWGVGS

SEQ ID NO: 210 - DNA, 1020 bp, Populus balsamifera subsp. trichocarpa
  misc_feature: Ceres ANNOT ID no.1526501
  misc_feature: Encodes the peptide sequence at SEQ ID NO 139
atgggatttcagagatcttcctattggcaaaaggtgcagcctggtagtgatctttctacaaaagagacggcaccaaattcaagtcaccctgtaaccaatgaagctgtttctgatgatgcagattacagttcatggatggtggaccatccttctgcattaacctcatttgatcagatgatgaaggatgcaaaggggaagaagatcgtcgtgtttttagactatgacggtactctctcgccgattgtaaatgatcctgaccgcgctttcatgtctgatgagatgcgtgcagcagttcgagaagttgcaaaatactttccaacagctataatcagtggtagaagcagagataagttgaataatatatattatgctggaagccatgggatggacatcatggcaccacctaggccggctaggtccagtgatggaaaataccatactgtttcccttgacagaaagggcaatgatgctgtctttcaacctgctcagaaatttttgcctgcaattcaaaagattttgaaagaactggaagaggcaattatgaaaataccaggtgccagagtagagaacaacagattttgtgcctccgtacattttcgacaagttagagaggaggattatgggaccttagaggagaaggtgaagtccatacttaaacactatccagactttcgcttgggttggggtaaaaaggttatggaaatacgaccatcaatagaatgggacaaaggcaatgccctggaatatttactcgatactctagggttaggtaactgcaccgatgttctcccactttacattggagatgacataacagatgaagatgctttcaaggtaattcaaaagagaggccaaggatgtccgatcgttgtcacttccagtcccaaggatactaaagcctcatactccctgtatgaaccatcagaagtgttgacattcttgttgcgtctagcaaggtggaggaaatcctctagttcgagtaggtcagtactatctcaggtttggggtgtgagtggttga

SEQ ID NO: 211 - DNA, 660 bp, Populus balsamifera subsp. trichocarpa
  misc_feature: Ceres ANNOT ID no.1490863
  misc_feature: Encodes the peptide sequence at SEQ ID NO 212
atggggcaacaaacgttgatctatagctttgtggcaagaggaacggtgcttcttgcggagtacacggagtttaaagggaatttcacaggcatcgctgcacaatgtcttgaaaaacttcccgcgtctaataataagtttacttataattgcgatggccataccttcaattacctcgttgaaaacggattcacttactgcgtggttgcagttgaatctgctggcagacaaattccaattgcctttttggagcgagttaaggaagattttaacaaaagatacagtggaggaaaagcagcaactgctgttgccaagagcctgaacggagagtttgggtccaaattgaaggggcatatgcagtattgtgtggatcatcctgaagagatcagcaagcttgcaaaagtcaaggctcaggtctctgaagttaaaggtgttatgatggaaaacattgagaaggttcttgatcgtggtgacaagattgagctgctggtggagaaaactgagaaccttcgctcacaggcacaagatttccgacaacagggaactaagatgagaagaaagatgtggattcagaatatgaagataaaactgattgttttgggtattataattgccttgattctcatcatagtcttatctatttgtcatggattcaattgctaa

SEQ ID NO: 212 - protein, 219 aa, Populus balsamifera subsp. trichocarpa
  misc_feature: Ceres ANNOT ID no.1490863
  misc_feature: Bit score of 169.4 for HMM based on sequences of FIGURE 13.
  misc_feature (127)..(215): Pfam Name: Synaptobrevin Pfam Description: Synaptobrevin
  misc_feature: Functional Homolog Of Ceres CLONE ID no. 41543 at SEQ ID NO. 160
MGQQTLIYSFVARGTVLLAEYTEFKGNFTGIAAQCLEKLPASNNKFTYNCDGHTFNYLVENGFTYCVVAVESAGRQIPIAFLERVKEDFNKRYSGGKAATAVAKSLNGEFGSKLKGHMQYCVDHPEEISKLAKVKAQVSEVKGVMMENIEKVLDRGDKIELLVEKTENLRSQAQDFRQQGTKMRRKMWIQNMKIKLIVLGIIIALILIIVLSICHGFNC

SEQ ID NO: 213 - DNA, 642 bp, Populus balsamifera subsp. trichocarpa
  misc_feature: Ceres ANNOT ID no.1501043
  misc_feature: Encodes the peptide sequence at SEQ ID NO 214
atggggcaacaatcattgatctatagctttgtggcaagaggaactgtgattcttgcggagtacacggagtttaaaggcaatttcactggcatcgctgcacaatgtcttcaaaaacttcccgcttccaataacaagtttacttataattgcgatggccataccttcaattacctcgttgaagatggattcattgaatccgctggcagacaaatcccaattgcctttttggagcgagttaaggaagattttaacaaaagatatggtggaggaaaagcagcaacggctgttgccaatagcctgaacagagagtttgggtccaagttgaaggagcacatgcagtattgtgtggatcatcctgaagagatcagcaagcttgcaaaagttaaggctcaggtttctgaagttaagggtgttatgatggaaaacattgagaaggttcttgatcgtggagagaagattgagctgctggtggataaaactgagaaccttcgctcacaggcacaagatttccgacaacagggaactaagatgagaagaaagatgtggattcagaatatgaagatgaaattgattgttttgggtattatcattgccttgattctcatcatagtgttatccgtgtgccatggcttcaattgttaa

SEQ ID NO: 214 - protein, 213 aa, Populus balsamifera subsp. trichocarpa
  misc_feature: Ceres ANNOT ID no.1501043
  misc_feature: Bit score of 162.2 for HMM based on sequences of FIGURE 13.
  misc_feature (121)..(209): Pfam Name: Synaptobrevin Pfam Description: Synaptobrevin
  misc_feature: Functional Homolog Of Ceres CLONE ID no. 41543 at SEQ ID NO. 160
MGQQSLIYSFVARGTVILAEYTEFKGNFTGIAAQCLQKLPASNNKFTYNCDGHTFNYLVEDGFIESAGRQIPIAFLERVKEDFNKRYGGGKAATAVANSLNREFGSKLKEHMQYCVDHPEEISKLAKVKAQVSEVKGVMMENIEKVLDRGEKIELLVDKTENLRSQAQDFRQQGTKMRRKMWIQNMKMKLIVLGIIIALILIIVLSVCHGFNC

SEQ ID NO: 215 - DNA, 642 bp, Populus balsamifera subsp. trichocarpa
  misc_feature: Ceres ANNOT ID no.1527507
  misc_feature: Encodes the peptide sequence at SEQ ID NO 216
atgagccagaaatcactgatctacgcatttgtttctcgaggaactgtgattcttgctgactatactgagttcagtgggaatttcaattccatagcttttcaatgtctccagaaacttcctgctactaacaacaagtttacttacaactgtgatggccacactttcaattacctcgttgacaatggctttactgaatcggctggaagacaagtacctatagcttttctggagcgtgttaaggatgattttgtgacaaaatatggcggtggaaaggctgccacagcccaggccaacggtcttaacaaggaatttgggccaaaattgaaggaacatatgcaatattgtgctgatcatcctgaagagataagcaagcttgccaaagtgaaagctcaggtctctgaagttaagggtgtcatgatggagaacattgagaaggttttggataggggggagaaaatagaacttcttgtggacaagactgagaaccttcatcaacaggcacaagacttccgcagtcaagggacacaaatccggagaaaaatgtggctgcagaacatgaaggttaagctgattgtattgggtatactgattgtcttgatcctcatcatagtcctctctatttgcaaaggcttcaactgctga

SEQ ID NO: 216 - protein, 213 aa, Populus balsamifera subsp. trichocarpa
  misc_feature: Ceres ANNOT ID no.1527507
  misc_feature: Bit score of 160.0 for HMM based on sequences of FIGURE 13.
  misc_feature (121)..(209): Pfam Name: Synaptobrevin Pfam Description: Synaptobrevin
  misc_feature: Functional Homolog Of Ceres CLONE ID no. 41543 at SEQ ID NO. 160
MSQKSLIYAFVSRGTVILADYTEFSGNFNSIAFQCLQKLPATNNKFTYNCDGHTFNYLVDNGFTESAGRQVPIAFLERVKDDFVTKYGGGKAATAQANGLNKEFGPKLKEHMQYCADHPEEISKLAKVKAQVSEVKGVMMENIEKVLDRGEKIELLVDKTENLHQQAQDFRSQGTQIRRKMWLQNMKVKLIVLGILIVLILIIVLSICKGFNC

SEQ ID NO: 217 - DNA, 642 bp, Populus balsamifera subsp. trichocarpa
  misc_feature: Ceres ANNOT ID no.1498633
  misc_feature: Encodes the peptide sequence at SEQ ID NO 218
atggggcaacaatcgttgatctatagcttcgtggctcgaggcacggtgattttggctgattacaccgatttctctggtaacttcgcgggcatagccgctcagtgtctccagaaacttcctgcaactaacaacaagttcacttacagctgcgatggccacaccttcaactacctcgtcgataacggcttcatggagtctgtggggcgacagattccgattgcctatctcgagagaatcaaggaggattttaccaacagatatggtggggggaaagctgcaatagcggttgctaatggtctgaagaaggaatttgggccgaagttgaaggagcagatgcagttttgtatggaccatccagaggaagtcagcaagcttgccaaagtgaaagctcaggtttctgaagtgaaaggagttatgatggaaaacatagagaaggttcttgatcggggagagaaaattgaacttctggtagacaaaacagaaaaccttcgctctcaggcacaagttttcaggcagcaagggggccagataaagaggaaaatgtggtggcagaacatgaaaataaagctgatagtgctggcgatcttgattgtcctgattctcatcatagtattgtctatttgtggtggcttcaaatgctga

SEQ ID NO: 218 - protein, 213 aa, Populus balsamifera subsp. trichocarpa
  misc_feature: Ceres ANNOT ID no.1498633
  misc_feature: Bit score of 156.1 for HMM based on sequences of FIGURE 13.
  misc_feature (121)..(209): Pfam Name: Synaptobrevin Pfam Description: Synaptobrevin
  misc_feature: Functional Homolog Of Ceres CLONE ID no. 41543 at SEQ ID NO. 160
MGQQSLIYSFVARGTVILADYTDFSGNFAGIAAQCLQKLPATNNKFTYSCDGHTFNYLVDNGFMESVGRQIPIAYLERIKEDFTNRYGGGKAAIAVANGLKKEFGPKLKEQMQFCMDHPEEVSKLAKVKAQVSEVKGVMMENIEKVLDRGEKIELLVDKTENLRSQAQVFRQQGGQIKRKMWWQNMKIKLIVLAILIVLILIIVLSICGGFKC

SEQ ID NO: 219 - DNA, 717 bp, Populus balsamifera subsp. trichocarpa
  misc_feature: Ceres ANNOT ID no.1465403
  misc_feature: Encodes the peptide sequence at SEQ ID NO 220
atgagtagtcagaaaggcttgatatatagttttgtggcaaagggaaatgtggtgctagcagagcacacatcgtattcggggaactttagtaccattgctgttcagtgtttgcagaagcttccttcaaatagcagcaagtacacgtactctagtgacgggcacacatttaacttcctcattgataatggatttgtttttctcgttgttgctgatgaatcagttgggaggggtgtgtcttttgtgtttcttgagcgagtgaaggatgattttaatcagcggtatggtgccagtattaaaaatgaggcacacccactagctgatgacgacgacgatgacgacttgtttgaagaccgatttagcattgcctacaatcttgacagagaatttgggccaagactcaaggagcatatgcagtactgcgtgaaccacccagaagagatcagtaagctctccaagttaaaggctcagataacggaggtcaaggggattatgatggacaacattgataaggttttggaccgtggagagaggattgaacttttggtagataaaacagataacctctcgttccaggctgacagcttccagaggcaaggaagggaattgcgacggaagatgtggcttcagaatctgaaagtgaagttagtcctgggaggaacagtccttgccttgattgtgatcgtgtggatttccgtttgtggaggtttcaaatgttag

SEQ ID NO: 220 - protein, 238 aa, Populus balsamifera subsp. trichocarpa
  misc_feature: Ceres ANNOT ID no.1465403
  misc_feature: Bit score of 155.5 for HMM based on sequences of FIGURE 13.
  misc_feature (146)..(234): Pfam Name: Synaptobrevin Pfam Description: Synaptobrevin
  misc_feature: Functional Homolog Of Ceres CLONE ID no. 41543 at SEQ ID NO. 160
MSSQKGLIYSFVAKGNVVLAEHTSYSGNFSTIAVQCLQKLPSNSSKYTYSSDGHTFNFLIDNGFVFLVVADESVGRGVSFVFLERVKDDFNQRYGASIKNEAHPLADDDDDDDLFEDRFSIAYNLDREFGPRLKEHMQYCVNHPEEISKLSKLKAQITEVKGIMMDNIDKVLDRGERIELLVDKTDNLSFQADSFQRQGRELRRKMWLQNLKVKLVLGGTVLALIVIVWISVCGGFKC

SEQ ID NO: 221 - DNA, 717 bp, Populus balsamifera subsp. trichocarpa
  misc_feature: Ceres ANNOT ID no.1510956
  misc_feature: Encodes the peptide sequence at SEQ ID NO 222
atgagtagtcagagaggcttgatatatagtttcgtggcaaagggaaatgtggttttagcagagcacacttcatattcagggaacttcagtaccgttgctgttcagtgtttacagaagctcccttccaatagcagcaagtacacgtactcttgtgatgggcacacgtttaacttcctcattgataatggatttgtttttcttgctgttgcagatgaatcggctgggaggggtttgccttttgtatttcttgaacgagtgaaggatgattttaaacagcggtatagcgccagtattaaaaatgaggcacacccactagctgatgacgatgatgatgacgacttgtttgaagaccgatttagcgtcgcctacaatcttgacagggagtttgggccaagactaaaggagcatatgcagtactgcttgaaccacccagaagagatcagtaagctatccaagttaaaggctcagatcacggaggtcaagggtattatgatggacaacattgaaaaggttttggaccgtggagagaggattgaacttctggtagataaaacagaaaacctccagttccaggctgacagcttccagaggcaaggaaggcaattgcgacggaagatgtggcttcagaatctccaaatgaagttgatggtgggaggaggagtccttgtcgtaattctgatcctgtggtttgttgcttgtggaggtttcaaatgttag

SEQ ID NO: 222 - protein, 238 aa, Populus balsamifera subsp. trichocarpa
  misc_feature: Ceres ANNOT ID no.1510956
  misc_feature: Bit score of 151.7 for HMM based on sequences of FIGURE 13.
  misc_feature (146)..(234): Pfam Name: Synaptobrevin Pfam Description: Synaptobrevin
  misc_feature: Functional Homolog Of Ceres CLONE ID no. 41543 at SEQ ID NO. 160
MSSQRGLIYSFVAKGNVVLAEHTSYSGNFSTVAVQCLQKLPSNSSKYTYSCDGHTFNFLIDNGFVFLAVADESAGRGLPFVFLERVKDDFKQRYSASIKNEAHPLADDDDDDDLFEDRFSVAYNLDREFGPRLKEHMQYCLNHPEEISKLSKLKAQITEVKGIMMDNIEKVLDRGERIELLVDKTENLQFQADSFQRQGRQLRRKMWLQNLQMKLMVGGGVLVVILILWFVACGGFKC

SEQ ID NO: 223 - DNA, 1569 bp, Populus balsamifera subsp. trichocarpa
  misc_feature: Ceres ANNOT ID no.1457735
  misc_feature: Encodes the peptide sequence at SEQ ID NO 224
atgagtagtcagagaggcttgatatatagtttcgtggcaaagggaaatgtggttttagcagagcacacttcatattcagggaacttcagtaccgttgctgttcagtgtttacagaagctcccttccaatagcagcaagtacacgtactcttgtgatgggcacacgtttaacttcctcattgataatggatttgtttttcttgctgttgcagatgaatcggctgggaggggtttgccttttgtatttcttgaacgagtgaaggatgattttaaacagcggtatagcgccagtattaaaaatgaggcacacccactagctgatgacgatgatgatgacgacttgtttgaagaccgatttagcgtcgcctacaatcttgacagggagtttgggccaagactaaaggagcatatgcagtactgcttgaaccacccagaagagatcagtaagctatccaagttaaaggctcagatcacggaggtcaagggtattatgatggacaacattgaaaaggttttggaccgtggagagaggattgaacttctggtagataaaacagaaaacctccagttccaggctgacagcttccagaggcaaggaaggcaattgcgacggaagatgtggcttcagaatctccaaatgaagttgatggtgggaggaggagtccttgtcgtaattctgatcctgtggtttatcttgtttgggagtgtaagtttatgtctatctctcatggaacacgaggaagaacttgtattggaaaatgtagactccgatacaatagtgcaatcttatgatttgtgcttggccggacgcttcctcacagacagatctatcaattttaatgctacgaggaacaaagtggcaaggctttggcgtccaggcaggggtatgtgcaccagggaactcagcgacagcaagtacttgattcaattttttcacagtgtggatatgaaaagggttcttgagggggctccctgggcgtttgacaatcatttgcttttgttgcatcgacttgttgaaggtgatgtcccacgtcaaatccctgttaaccatgttgatttttgggtccaaatttatgagcttcaagtgggttatatgtccttagttataggcaagcaactgggtgactttattggtacctttgttgattatgataccatcaacaacaatggagctcggaggagctacatgaggattagggtcacaattgatggtcaccaccctttgaagaaaatacgcaagggagaaggctcctcgtatatggtccagttcaaatatgaaagacttggtcatgcagatagattttgtaagcatttgtttgagatgcatgagagggagggattgggggacatggttaagggcgtcggcaaggagaagctccggcgaggatggtggtcgatggctgcgggaggatgccgcgatcaattagcaactctcctagcccaagaggaggcatattggaggcagcgagcaaagctactatggttgaaggagggtgatttgaataccaagtatttccatgagatggcttctagtaaaagaaagtgcaacatgctgacttacgctgattaa

SEQ ID NO: 224 - protein, 522 aa, Populus balsamifera subsp. trichocarpa
  misc_feature: Ceres ANNOT ID no.1457735
  misc_feature: Bit score of 150.3 for HMM based on sequences of FIGURE 13.
  misc_feature (146)..(234): Pfam Name: Synaptobrevin Pfam Description: Synaptobrevin
  misc_feature: Functional Homolog Of Ceres CLONE ID no. 41543 at SEQ ID NO. 160
MSSQRGLIYSFVAKGNVVLAEHTSYSGNFSTVAVQCLQKLPSNSSKYTYSCDGHTFNFLIDNGFVFLAVADESAGRGLPFVFLERVKDDFKQRYSASIKNEAHPLADDDDDDDLFEDRFSVAYNLDREFGPRLKEHMQYCLNHPEEISKLSKLKAQITEVKGIMMDNIEKVLDRGERIELLVDKTENLQFQADSFQRQGRQLRRKMWLQNLQMKLMVGGGVLVVILILWFILFGSVSLCLSLMEHEEELVLENVDSDTIVQSYDLCLAGRFLTDRSINFNATRNKVARLWRPGRGMCTRELSDSKYLIQFFHSVDMKRVLEGAPWAFDNHLLLLHRLVEGDVPRQIPVNHVDFWVQIYELQVGYMSLVIGKQLGDFIGTFVDYDTINNNGARRSYMRIRVTIDGHHPLKKIRKGEGSSYMVQFKYERLGHADRFCKHLFEMHEREGLGDMVKGVGKEKLRRGWWSMAAGGCRDQLATLLAQEEAYWRQRAKLLWLKEGDLNTKYFHEMASSKRKCNMLTYAD

SEQ ID NO: 225 - protein, 219 aa, Arabidopsis thaliana
  misc_feature: Public GI ID no.15224711
  misc_feature: Bit score of 603.9 for HMM based on sequences of FIGURE 13.
  misc_feature (123)..(211): Pfam Name: Synaptobrevin Pfam Description: Synaptobrevin
  misc_feature: Functional Homolog Of Ceres CLONE ID no. 41543 at SEQ ID NO. 160
MSILYALVARGTVVLAELSTTSTNASTIAKQILEKIPGNGDSHVSYSQDRYVFHVKRTDGLTVLCMADEDAGRRIPFSFLEDIHQRFVRTYGRAIHSAQAYAMNDEFSRVLNQQIEYYSNDPNADTISRIKGEMNQVRDVMIENIDNILDRGERLELLVDKTANMQGNTFRFRKQTRRFNNTVWWRNCKLTLLLILVLLVIIYIGVAFACHGPTLPSCV

SEQ ID NO: 226 - DNA, 1197 bp, Populus balsamifera subsp. trichocarpa
  misc_feature: Ceres ANNOT ID no.1520801
  misc_feature: Encodes the peptide sequence at SEQ ID NO 209
atgggagctagctatctcttggtttggtttgtgaggcctggatgtttacatgttaaaaaggatgcatgtcagaagaacgttttgagcgacactccaaaacccactcctcatcagtcattctcatcttggtatcttgatatgtttaagagaaattttgcaaagcttaaccaggccatgggatttcaaagatcttccaacaggcaaaaggtgcagcctggtgctagtgatctctcttcaaatgagagagcaccaaattcgtgtcatcctgtaatcaatggatcagctgtttctgatgatgcaaattacagttcatggatggtggaccatccttctgcattgacctcatttgatcagatgatgaaagatgcaaaggggaagaagatcgtcgtgtttttagactacgacggaactctctcgccgattgtaaatgatcctgatcgtgctttcatgtctgatgagatgcgtgcagcagttcgtgaagttgcaaaatactttccaacagctataatcagtggtagaagcagagataagttgaataacatatattatgctggaagccatgggatggacattatggcaccacctaggcctgttaggtctagtgatgggaaatatcatactgtatcccttgacagaaagggcaatgaagctgtctttcaacctgctcagaaattcttaccttcaattcaaaagattctgaaagaactggaagaggcaattatgaaaatacaaggtgccagggtagaaaacaacagattttgtgtctctgtacattttcgacaagttcgagatgaggattatgggatcttagaggagaaggtgaagtctattctgaaacactatccagactttcgtttgggttggggtaagaaggttatggaaatacgaccatcaatagaatgggacaaaggcaacgccctagaatatttgctcgatactctagggttaggcaactgcaccgatgttctcccggtttatatcggagatgaccggacagatgaagatgctttcaaggtgattcaaaagagaggccaagggtatccaatcgtggtagcgtccagtccgaaggatacgaaagcttcctactccctccatgacccgtcggaagtcttgactttcttgctgcgtctagcaaggtggaggaaggcctctagttcgagcaggtcactgtctcagatctggggtgtgggtagctaa

SEQ ID NO: 227 - DNA, 1121 bp, Arabidopsis thaliana
  misc_feature: Ceres CLONE ID no.40062
  misc_feature: Encodes the peptide sequence at SEQ ID NO 228
gtagggttcctcaaaatcatttcaataattcaatttcagatgtatggtgatgcttctttgattacaaatcggcgttgaacaattctccgattttacactctaatcgaatcactttggggtgttttgttaatcgctgttctcaagatctgagatttacagggagaagtgagctggaacaaggtgccggagtagatggcgatcatatttgcgttggtggctcgtggaacggtggtgttatcggagtttagcgctacttcgactaacgctagctcaatctcgaagcagattttggagaagttgcctggaaacgatagcgatagccatatgtcttactctcaggatcgctacatcttccatgtgaaacgaacagatggtcttaccgttctctgtatggccgacgaaaccgccggaaggaatattccgtttgcgtttttggatgatattcatcagaggtttgtgaaaacatatggccgagctattcattcagctcaagcttattccatgaatgatgaattttcaagagttctgagtcaacagatggagttttattccaatgatcctaatgcagacaggatgagcagaatcaaaggtgaaatgagtcaggttcgaaatgtgatgattgagaatattgataaagttttggatagaggggagcgtttggagttgctagttgataaaaccgaaaatatgcaaggcaacacttttcgtttcagaaagcaagctcgtcgttacagaaccattatgtggtggagaaatgtcaagcttacaattgctctgatacttgtactagctttggttgtgtacatcgcgatggcctttgtttgccatgggccaagtcttccttcttgtttcaagtaagaagacattctcttatcttcttcacctttcccttcttgggaattatcagactctgcttcgattttggaatgtgagattatatgcgtttgtctaaaatgtgtgtttatgtgatctttcaatttcagcttctgcttattgctttgaattacagagtcgattatttatttgtaagtgtgatatttcactgttaatgatcatcccctgtctgtttgcaatttatgctgcggcgttaaaagttgtattaaatgatgacgtttttagcc

SEQ ID NO: 228 - protein, 221 aa, Arabidopsis thaliana
  misc_feature: Ceres CLONE ID no.40062
  misc_feature: Bit score of 603.2 for HMM based on sequences of FIGURE 13.
  misc_feature (124)..(212): Pfam Name: Synaptobrevin Pfam Description: Synaptobrevin
  misc_feature: Functional Homolog Of Ceres CLONE ID no. 41543 at SEQ ID NO. 160
MAIIFALVARGTVVLSEFSATSTNASSISKQILEKLPGNDSDSHMSYSQDRYIFHVKRTDGLTVLCMADETAGRNIPFAFLDDIHQRFVKTYGRAIHSAQAYSMNDEFSRVLSQQMEFYSNDPNADRMSRIKGEMSQVRNVMIENIDKVLDRGERLELLVDKTENMQGNTFRFRKQARRYRTIMWWRNVKLTIALILVLALVVYIAMAFVCHGPSLPSCFK

SEQ ID NO: 229 - protein, 220 aa, Arabidopsis thaliana
  misc_feature: Public GI ID no.15220315
  misc_feature: Bit score of 165.7 for HMM based on sequences of FIGURE 13.
  misc_feature (127)..(215): Pfam Name: Synaptobrevin Pfam Description: Synaptobrevin
  misc_feature: Functional Homolog Of Ceres CLONE ID no. 41543 at SEQ ID NO. 160
MGQQSLIYSFVARGTVILAEYTEFKGNFTSVAAQCLQKLPSSNNKFTYNCDGHTFNYLADNGFTYCVVVIESAGRQIPMAFLERVKEDFNKRYGGGKASTAKANSLNKEFGSKLKEHMQYCADHPEEISKLSKVKAQVTEVKGVMMENIEKVLDRGEKIELLVDKTENLRSQAQDFRTQGTKMKRKLWFENMKIKLIVFGIIVALILIIILSVCHGFKCT

SEQ ID NO: 230 - DNA, 909 bp, Arabidopsis thaliana
  misc_feature: Ceres CLONE ID no.36480
  misc_feature: Encodes the peptide sequence at SEQ ID NO 231
gttttgttctttcatagtcttctagatctgtagtttttttccgcgaccgcccaaaaaattctctgatcagacggtcgattggatcggagatttaaggtaaagaaaaaatggcgcaacaatcgttgatctacagttttgtagctcgcggcacggtgatcctcgttgagttcactgatttcaaaggtaatttcacctcaatcgctgctcagtgcctccagaagcttccgtcttcgaacaacaagttcacctacaactgcgacggtcataccttcaattaccttgtcgaagatggattcacctattgtgttgttgcggttgattctgctgggaggcaaattcccatgtcctttttggaaagagtaaaagaagattttaacaagcgatatggtggtggaaaagctgcaactgctcaagcaaacagcttgaataaggagtttggctctaaactgaaagagcatatgcagtattgcatggatcatcctgatgagattagcaagcttgctaaggtgaaggcgcaagtgtcagaagttaagggtgtaatgatggaaaacattgagaaggttcttgaccgtggtgagaaaattgagcttttggtggacaaaaccgaaaatcttcgctcacaggcacaagatttcagaacaacaggaacgcagatgagaagaaagatgtggcttcagaacatgaagataaaactcatagtgctcgccatcattatcgcactgattctcatcatcgtgctctcagtttgccatgggtttaagtgttaagcccagaaaattcaaaacttctgagatctttctcactcggtacatcgtagtgccttctcttttattgttcgatcttcaatctaatgtttctgcttgaattggttttgtatagatagacatatatgtatgctactcatttgct

SEQ ID NO: 231 - protein, 219 aa, Arabidopsis thaliana
  misc_feature: Ceres CLONE ID no.36480
  misc_feature: Bit score of 170.8 for HMM based on sequences of FIGURE 13.
  misc_feature (127)..(215): Pfam Name: Synaptobrevin Pfam Description: Synaptobrevin
  misc_feature: Functional Homolog Of Ceres CLONE ID no. 41543 at SEQ ID NO. 160
MAQQSLIYSFVARGTVILVEFTDFKGNFTSIAAQCLQKLPSSNNKFTYNCDGHTFNYLVEDGFTYCVVAVDSAGRQIPMSFLERVKEDFNKRYGGGKAATAQANSLNKEFGSKLKEHMQYCMDHPDEISKLAKVKAQVSEVKGVMMENIEKVLDRGEKIELLVDKTENLRSQAQDFRTTGTQMRRKMWLQNMKIKLIVLAIIIALILIIVLSVCHGFKC

SEQ ID NO: 232 - DNA, 1120 bp, Arabidopsis thaliana
  misc_feature: Ceres CLONE ID no.2443
  misc_feature: Encodes the peptide sequence at SEQ ID NO 233
aaaactcaagggtttgatttttcttcttcaactacgttaagatttctcctacacttttctttttcaccgtattctcttttagtcctcgattctctacgcgtttcagcgtcaagtcttctagatctctaaagccttcgtgctcgccaatataaatctctgagatcggtcccgtaaaatcggattcgcgtcgtttttgagtaaaaaaaatggcgcaacaatcgttgatctacagtttcgtcgctcgtggtaccgttatcctcgttgagttcacagatttcaaaggcaatttcacatcaatcgctgctcagtgccttcagaagcttccttcttctaacaacaagtttacctacaactgcgatggtcacacgttcaattacctcgtcgaaaatggattcacctattgtgttgttgcagttgattctgctgggaggcagattcctatggctttcttggaacgagttaaggaggatttcaacaagagatatggtggtggaaaggctgcaactgctcaagcaaacagcttgaataaagaatttgggtcgaaactgaaagagcatatgcagtattgcatggatcatcctgatgagattagcaagcttgctaaggttaaagctcaagtgtctgaagttaaaggtgttatgatggaaaacattgagaaggttcttgaccgtggtgagaagattgagcttttggttgacaaaacagaaaaccttcgctcacaggcgcaagattttagaacacaaggaactcaaatgagaagaaagatgtggtttcagaacatgaagataaagctcattgtccttgcaattatcattgccttgattctcatcatcatcctctcaatttgtgggggattcaactgcggtaaataagtctggaacatttcttcccggcgttatcgactgcgctctgtgcttcccaagatctctgagaatatcttcattcagttcgttgtgctaccttttttttgtttttgtttttgtgatttctatattctcatactatatgtttcttcttagattgtacttcttgaaatttgttttgtataggctatatatattatacatatatgtatgcatgttcgacaatctgcaatgttgctattgctggtactgacact

SEQ ID NO: 233 - protein, 221 aa, Arabidopsis thaliana
  misc_feature: Ceres CLONE ID no.2443
  misc_feature: Bit score of 174.7 for HMM based on sequences of FIGURE 13.
  misc_feature (127)..(215): Pfam Name: Synaptobrevin Pfam Description: Synaptobrevin
  misc_feature: Functional Homolog Of Ceres CLONE ID no. 41543 at SEQ ID NO. 160
MAQQSLIYSFVARGTVILVEFTDFKGNFTSIAAQCLQKLPSSNNKFTYNCDGHTFNYLVENGFTYCVVAVDSAGRQIPMAFLERVKEDFNKRYGGGKAATAQANSLNKEFGSKLKEHMQYCMDHPDEISKLAKVKAQVSEVKGVMMENIEKVLDRGEKIELLVDKTENLRSQAQDFRTQGTQMRRKMWFQNMKIKLIVLAIIIALILIIILSICGGFNCGK

SEQ ID NO: 234 - protein, 220 aa, Arabidopsis thaliana
  misc_feature: Public GI ID no.30685375
  misc_feature: Bit score of 165.9 for HMM based on sequences of FIGURE 13.
  misc_feature (127)..(215): Pfam Name: Synaptobrevin Pfam Description: Synaptobrevin
  misc_feature: Functional Homolog Of Ceres CLONE ID no. 41543 at SEQ ID NO. 160
MGQQNLIYSFVARGTVILVEYTEFKGNFTAVAAQCLQKLPSSNNKFTYNCDGHTFNYLVENGFTYCVVAVESVGRQIPMAFLERVKEDFNKRYGGGKATTAQANSLNREFGSKLKEHMQYCVDHPDEISKLAKVKAQVTEVKGVMMENIEKVLDRGEKIELLVDKTENLRSQAQDFRTQGTKIRRKMWFENMKIKLIVLGIIITLILIIILSVCGGFKCT

SEQ ID NO: 235 - protein, 221 aa, Brassica juncea
  misc_feature: Public GI ID no.126009434
  misc_feature: Bit score of 539.0 for HMM based on sequences of FIGURE 13.
  misc_feature (124)..(212): Pfam Name: Synaptobrevin Pfam Description: Synaptobrevin
  misc_feature: Functional Homolog Of Ceres CLONE ID no. 41543 at SEQ ID NO. 160
MAIIYAVVARGTVVLAEFSAVTGNTDAVVRRILEKLSPETADERLCFSQDRYIFHILRSDGLTFLCMANDTFGRRIPFSYLEEIQMRFMKNYGKVAHQAPAYAMNDEFSRVLHQQMEFFSSNPSVDTLNRVRGEVSEIRSVMVDNIEKIMERGDRIELLVDKTATMQDSAFHFRKQSKRLRRALWMKNAKLLVMLTCVIVLVLYIIIASFCGGITLPSCRS

SEQ ID NO: 236 - DNA, 1010 bp, Brassica napus
  misc_feature: Ceres CLONE ID no.965753
  misc_feature: Encodes the peptide sequence at SEQ ID NO 237
atttcttttcaccgtctctctctctttctcatttagtctctacgcgtttcagcgttaaagtctttttctagatctcctctaccttcacgccgatataacaaaactctctgatcagtcaatagaaacccaccaatagagagagagaacacaaaaaaaaaaaaatggcgcagcaacaacaatcgctgatctacagtttcgtggctcgagggacggtgatcctcgtcgagttcaccgatttcaaaggcaatttcacatccatcgctgcacagtgcctccagaagcttccttcctccaacaacaagttcacctacaactgcgatggtcacaccttcaattacttggttgaaaatggattcacttattgtgttgttgcagttgattcagctgggaggcagattcctatggccttcttggagcgagttaaggatgatttcamcaagagatacggtggtgggaaggcagcaactgctcaagcgaacagcttgaataaggagtttgggtcgaaactgaaagagcacatgcagtattgtatggatcatcctgatgagattagcaagcttgctaaggtgaaagctcaagtttctgaagttaaaggtgtcatgatggaaaacattgagaaggttcttgmccgtggtgagaaaattgaacttttggtggacaaaaccgaaaaccttcgctcacaggsgcaagacttcagaacmcaaggaacacaaatgagaagaaagatgtggtttcagaacatgaagataaagctcattgttcttgcaatcatcatcgccttgatcctcatcatcgtcctctcagtctgcggtggcttcaactgtggcaaataagtctgggaacatttctgattcccgagaacatcctcattcagttcgttgtgctggtttttttctttttgtggtttaaaaattctcatggctatgtttcttctctgcttagatttgtacttctttaaattggttttgtataggtcatatatatatgtttgaaattgattcttgcgaacc

SEQ ID NO: 237 - protein, 223 aa, Brassica napus
  misc_feature: Ceres CLONE ID no.965753
  misc_feature: Bit score of 169.4 for HMM based on sequences of FIGURE 13.
  misc_feature (129)..(217): Pfam Name: Synaptobrevin Pfam Description: Synaptobrevin
  misc_feature: Functional Homolog Of Ceres CLONE ID no. 41543 at SEQ ID NO. 160
  misc_feature (92)..(92): Xaa is any aa, unknown, or other
  misc_feature (156)..(156): Xaa is any aa, unknown, or other
  misc_feature (175)..(175): Xaa is any aa, unknown, or other
  misc_feature (180)..(180): Xaa is any aa, unknown, or other
MAQQQQSLIYSFVARGTVILVEFTDFKGNFTSIAAQCLQKLPSSNNKFTYNCDGHTFNYLVENGFTYCVVAVDSAGRQIPMAFLERVKDDFXKRYGGGKAATAQANSLNKEFGSKLKEHMQYCMDHPDEISKLAKVKAQVSEVKGVMMENIEKVLXRGEKIELLVDKTENLRSQXQDFRXQGTQMRRKMWFQNMKIKLIVLAIIIALILIIVLSVCGGFNCGK

SEQ ID NO: 238 - DNA, 810 bp, Brassica napus
  misc_feature: Ceres CLONE ID no.948834
  misc_feature: Encodes the peptide sequence at SEQ ID NO 239
aaaaaataaagatcccaaaactctctctcttctctctgagccgactcggtgggcgactcaatgggtcagggatcgttcatctacagcttcgtcgcgagaggcactatggtcctggccgagtacaccgagttcacgggcaacttcccgtcgatagcagctcagtgtctgcagaagcttccttcctccagcaacagcaagttcacttacaactgcgatcaccacaccttcaacttcctcgtcgaagacggcttcgcatattgtgttgtggcgaaagatgctcttagcaagcaaatctcgattgcatttctggagcgggtgaaagctgatttcaagaaaaggtatgggggcggaaaagcaagtacagctatccccaaaagtctcaacaaggagttcgggccggtgatgaaagaacacatgaagtatattgttgaccatgcagaggagattgaaaagctaattaaagtcaaggctcaagtttcagaagtcaaaagtataatgttggagaatattgacaaggcaatcgacagaggagaaaatctgacggttcttactgacaagaccgagaatctacgctctcaggcgcaagagtacaagaaacaagggacacaagtgaggaggaaactgtggtaccagaacatgaagataaaacttgtggttctcgggatcttgctactacttgttctcattatctggctttcggtttgtcacgggtttaattgcacagattgaagacatyttcagaatgtgatgttagagcctctggtgaggaatggtgtgtctgagacagaagtctccggtagaggggtaggg

SEQ ID NO: 239 - protein, 222 aa, Brassica napus
  misc_feature: Ceres CLONE ID no.948834
  misc_feature: Bit score of 139.1 for HMM based on sequences of FIGURE 13.
  misc_feature (128)..(216): Pfam Name: Synaptobrevin Pfam Description: Synaptobrevin
  misc_feature: Functional Homolog Of Ceres CLONE ID no. 41543 at SEQ ID NO. 160
MGQGSFIYSFVARGTMVLAEYTEFTGNFPSIAAQCLQKLPSSSNSKFTYNCDHHTFNFLVEDGFAYCVVAKDALSKQISIAFLERVKADFKKRYGGGKASTAIPKSLNKEFGPVMKEHMKYIVDHAEEIEKLIKVKAQVSEVKSIMLENIDKAIDRGENLTVLTDKTENLRSQAQEYKKQGTQVRRKLWYQNMKIKLVVLGILLLLVLIIWLSVCHGFNCTD

SEQ ID NO: 240 - protein, 194 aa, Pyrus pyrifolia
  misc_feature: Public GI ID no.33347409
  misc_feature: Bit score of 117.1 for HMM based on sequences of FIGURE 13.
  misc_feature (127)..(194): Pfam Name: Synaptobrevin Pfam Description: Synaptobrevin
  misc_feature: Functional Homolog Of Ceres CLONE ID no. 41543 at SEQ ID NO. 160
MGQQSLIYSFVARGTVILAEYTEFTGNFTSIASQCLQKLPATNNKFTYNCDGHTFNYLVDNGFTYCVVAVEAVGRQVPIAFLERIKEDFTGRYGGGKAATAVANSLNKEFGSKLKEHMQYCVDHPEEISKLSKVKAQVSEVKGVMMENIEKVLDRGEKIELLVDKTENLRSQAQDFRQQGTQMRRKMWLQNMKL

SEQ ID NO: 241 - DNA, 1255 bp, Glycine max
  misc_feature: Ceres CLONE ID no.470694
  misc_feature: Encodes the peptide sequence at SEQ ID NO 242
aaagaagaaagtgacagtggatgaacagaagaagaagaagaaaagggttttgtgtgtgtcgaagtggatagttccttccttcaattaatctccgatccgaaaccgaatggggattctgtacgcgctggttggtcgtggatcggtggtgctggcggagttcagcggcaccaccaccaacgccagcgcaatcgcgcgtcagatccttgaaaaaatccccggcaacaacgacacgcacgtttcttactctcaggatcgctacatcttccatgttaaacgcaccgatggactcaccgttctctgcatggccgacgacaccgccggaaggcgaattccttttgcgtttcttgaggatattcatcagaagttcgtgcggacttacggacgcgccgttcactccgctcagccttacgggatgaacgaggagttctctagggttttgagtcagcaaatggagtattactccagtgatcctaacgccgataggatcaatcgtctcaaaggtgaaatgtctcaggtacggaatgtcatgatagaaaatattgacaaagttttagatagaggtgatcggttggaattgctggtcgataaaactgctaatatgcaaggaaacacatttcgcttcaggaaacaagctcgtcgcttcagaagcactgtttggtggagaaatgtcaagcttacgattgcacttatagtcgtcctactagtgatagtttatgttgtattggcatttgtttgccatgggcctgcgctaccatcttgtttttaagtgaaggattggcaagtgaattttatgtgtgctttcttgtcttcttcagcttgcagaggtcacttcttttttatctgccattgttatgcagactcccatttcttcaacttaatttctgggttgtccacttttgtgctagtaaatttcttgtaatagattcaagtgttttgggttgtatttttcattatgagacttgaggggcaaaaaaaaaactattgtatcatgttatttattgtattctcctaccagcccaaagatttggattgaaccagaaaatggctgagattttgattgatgtatagtgttgcagcgtgaggttgtcaacgtgccatggatgttctcttgttcaagagggagaagggtaaaccttaaattccatttgtcccttcatagcttagtgaagggagattttatactgctcggccaggttctcttgtccagttgatgcatgtgaaccgcataagcttaatgtatatattcttaaatttg

SEQ ID NO: 242 - protein, 219 aa, Glycine max
  misc_feature: Ceres CLONE ID no.470694
  misc_feature: Bit score of 659.0 for HMM based on sequences of FIGURE 13.
  misc_feature (123)..(211): Pfam Name: Synaptobrevin Pfam Description: Synaptobrevin
  misc_feature: Functional Homolog Of Ceres CLONE ID no. 41543 at SEQ ID NO. 160
MGILYALVGRGSVVLAEFSGTTTNASAIARQILEKIPGNNDTHVSYSQDRYIFHVKRTDGLTVLCMADDTAGRRIPFAFLEDIHQKFVRTYGRAVHSAQPYGMNEEFSRVLSQQMEYYSSDPNADRINRLKGEMSQVRNVMIENIDKVLDRGDRLELLVDKTANMQGNTFRFRKQARRFRSTVWWRNVKLTIALIVVLLVIVYVVLAFVCHGPALPSCF

SEQ ID NO: 243 - DNA, 1051 bp, Glycine max
  misc_feature: Ceres CLONE ID no.643614
  misc_feature: Encodes the peptide sequence at SEQ ID NO 244
atcttttgatttgataacaacaacctcgttgtggttttccaatgctgcgaagtcgaagatctagctagaggcagagaacgttctccctaatcttctgccgatggcgatcttctacgctttggtggccagaggcaccgtcgtcctggcggagttcagcgccgtcaccggcaacaccggcgccgtctcccgccgcatcctcgagaagcttccggcggagtccgactccaggctctgcttctctcaggatcgctacatcttccacatactccgatcggatggcatcacctacgtctgtatggccaacgacaccttcggaaggagaattcctttctcgtacttggaagatatccaaatgaggtttatgaagaactacagtagagttgccaattatgcaccagcttatgcaatgaatgatgaattttcaagggttttgcatcagcagatggaatttttttctagtaatacgagtgccgataccctcaatcgtgtgaggggagaagttggtgagatacgcactatcatggtggacaatattgagaaaatattggagagaggtgaccggattgagcttcttgttgataaaacagcaacaatgcaagacagtgcatttcactttaggaaacagtcaaagcgccttcgaagagctctttggatgaaaaattttaaactcctggccttattgacatgcttgattgttgttgttctttatttaataatcgctgcttgttgtggaggcatctctctaccgtcctgcagatcctaattgtcactcttgccagtttatttgttttctgagctctgcaactatcaagatcgtacgataagcattggacgacacttaagtattccagattcaaatttatgagctgagtggataaatttgataaaggattcagaaactgttacatgtatttgcttgtttatgtcgtttttggttctgtattatagaagttcgcgctgcagtctgataagatactattctatgattatgggccatccttctgtaaatgtggatttttatttttcataatcaaagttaaaattgtttttt

SEQ ID NO: 244 - protein, 220 aa, Glycine max
  misc_feature: Ceres CLONE ID no.643614
  misc_feature: Bit score of 536.8 for HMM based on sequences of FIGURE 13.
  misc_feature (123)..(211): Pfam Name: Synaptobrevin Pfam Description: Synaptobrevin
  misc_feature: Functional Homolog Of Ceres CLONE ID no. 41543 at SEQ ID NO. 160
MAIFYALVARGTVVLAEFSAVTGNTGAVSRRILEKLPAESDSRLCFSQDRYIFHILRSDGITYVCMANDTFGRRIPFSYLEDIQMRFMKNYSRVANYAPAYAMNDEFSRVLHQQMEFFSSNTSADTLNRVRGEVGEIRTIMVDNIEKILERGDRIELLVDKTATMQDSAFHFRKQSKRLRRALWMKNFKLLALLTCLIVVVLYLIIAACCGGISLPSCRS

SEQ ID NO: 245 - DNA, 1067 bp, Glycine max
  misc_feature: Ceres CLONE ID no.1049362
  misc_feature: Encodes the peptide sequence at SEQ ID NO 246
gacccttcttcttgttattccacttgcgttaggtttctactttcttctctctctctctctctctcttcattcctcatttttccctcaaacaatcaatcaattttcattcagattcgtaaatttctcgattagatcacggggttaggtctcccactttatcttttcccaagcctttctctttccccctttccctgtctgccccataaaattcaggatcggaaacgaactgggttcttgaatttcactctagattttgacaaattcgaagtgtgcatgcactgatgcgacccactcccccttttttgcattaaacaattatgaattgaggtattggtgtgattgtttgtaccatccggtggtggagcttgttggaaattggagatgagtcagaggggtttaatatatagctttgttgccaaaggaactgttgttttagcagagcacacgcaatataccgggaatttcagtaccattgccgttcagtgcctgcagaagctgccatcaaatagcagcaaatacacgtattcctgtgatggtcacaccttcaatttcctcctagacaatggatttgttttccttgttgttgctgatgaatcgattggcaggagtgttccttttgtatttcttgaacgggtgaaggatgactttatgaagcgctatggtgctagcattaagaatgacggtgcccatccacttgccgatgatgaggacgatgacgatttgtttgaggacagatttagcattgcatataatcttgacagagaatttggaccagcactcaaggagcatatgcagtattgcatgaaccatccagaagaaatgagtaaactatcaaaattgaaggctcaaataactgaggtcaaggggataatgatggacaatattgagaaggttttggatcgtggagagaagattgaactgctggtggacaaaacagaaaacttacagttccaggctgacagcttccagaggcagggcaggcagctgagaaggaagatgtggctgcagaatctccaaatgaagctgatggtgggaggaggaatccttatcttaattataattctgtg

SEQ ID NO: 246 - protein, 228 aa, Glycine max
  misc_feature: Ceres CLONE ID no.1049362
  misc_feature: Bit score of 139.7 for HMM based on sequences of FIGURE 13.
  misc_feature (146)..(227): Pfam Name: Synaptobrevin Pfam Description: Synaptobrevin
  misc_feature: Functional Homolog Of Ceres CLONE ID no. 41543 at SEQ ID NO. 160
MSQRGLIYSFVAKGTVVLAEHTQYTGNFSTIAVQCLQKLPSNSSKYTYSCDGHTFNFLLDNGFVFLVVADESIGRSVPFVFLERVKDDFMKRYGASIKNDGAHPLADDEDDDDLFEDRFSIAYNLDREFGPALKEHMQYCMNHPEEMSKLSKLKAQITEVKGIMMDNIEKVLDRGEKIELLVDKTENLQFQADSFQRQGRQLRRKMWLQNLQMKLMVGGGILILIIIL

SEQ ID NO: 247 - DNA, 1090 bp, Glycine max
  misc_feature: Ceres CLONE ID no.546675
  misc_feature: Encodes the peptide sequence at SEQ ID NO 248
gactttcaaacgaagaaaaagaagaaaccaaacgcggccaagttgctgatataaagcaactcaagcaagtagactaaaagctctctctctctctctctgcttccgagttccgagttgcgagttgcagagagagcaatgagtcaggaatcgtttatatatagcttcgtggctcgggggacgatggtgttagccgagtacaccgagttcactgggaacttccctgcaattgcagctcagtgcctccagaaactaccctcttccaataacaagttcacctacaattgcgaccaccacaccttcaattttctcgtcgaagacggttacgcttactgtgttgttgccaaggaatctgttagcaaacaaatctctattgctttccttgaacgtgtaaaagcggactttaagaaaagatatggtggtggaaaggcagacacggctgttgccaaaagtctcaacaaggagtttggaccagttatgaaagagcacatgaagtatatcatagaccatgctgaagagattgaaaagctaataaaagtgaaggctcaagtttcagaagttaaaagtattatgttagagaacattgataaggccattgatagaggagaaaatctaactattctggcggmcaagacagagactttgcactcacaagcccaggaattcaaaaagcaaggaactcatgtccgtcggaagatgtggtatcagaacacgaaaatcaaattggttgttcttggaattttgttgcttttggtcctggttatctggctttctgtttgccatggattcaactgcgcaaactagaaacaaatgaaagtttatggataggtatttaaatgatgtttaaagagcaatttyttaaaagctttagcaagaatctgcttagaaggggggagtttggcaactggagaaaaagtttcctaccttctttatttgttgataatcatatacgatattcttggaaattcttaagagaaaggagatcgggtgtatttgtaatgtatcatatgctggactgtttggtcttgtcaaacaatatagttgtaatttgcttctcttttcttctttattttaaatatagaaaaatgttatt

SEQ ID NO: 248 - protein, 221 aa, Glycine max
  misc_feature: Ceres CLONE ID no.546675
  misc_feature: Bit score of 131.8 for HMM based on sequences of FIGURE 13.
  misc_feature (127)..(215): Pfam Name: Synaptobrevin Pfam Description: Synaptobrevin
  misc_feature: Functional Homolog Of Ceres CLONE ID no. 41543 at SEQ ID NO. 160
  misc_feature (164)..(164): Xaa is any aa, unknown, or other
MSQESFIYSFVARGTMVLAEYTEFTGNFPAIAAQCLQKLPSSNNKFTYNCDHHTFNFLVEDGYAYCVVAKESVSKQISIAFLERVKADFKKRYGGGKADTAVAKSLNKEFGPVMKEHMKYIIDHAEEIEKLIKVKAQVSEVKSIMLENIDKAIDRGENLTILAXKTETLHSQAQEFKKQGTHVRRKMWYQNTKIKLVVLGILLLLVLVIWLSVCHGFNCAN

SEQ ID NO: 249 - DNA, 1479 bp, Glycine max
  misc_feature: Ceres CLONE ID no.522046
  misc_feature: Encodes the peptide sequence at SEQ ID NO 250
ttttctctctctacaaagagtgcgtgtgagagtgagagagagagagagagggatttggaactttggatatctatagcgaaagcgtgacaccaccaaaaaccgaactgttcccagatctctctctcactcttccaacaatcgaaatccaaaaccctaccgacaccacactcaatcgaaattcttcattctcttctcatcgatggggcagaagtctctgatctacgcgttcgtgtcgcggggaacagtgattctcgcggagtacaccgaattcagcggaaacttcaactccatcgccttccagtgccttcagaagctccctgccaccaacaacaagttcacctacaattgcgacgcacacaccttcaattacctcgtcgacaatggctacacatattgtgttgttgcagatgaatcaactggaagacagttacccatggcttttctagagcgtgtcaaagatgaatttgtgtcaaaatatggtggtggaaaggctgccacagctcctgcaaacagccttaacaaggaatttgggccaaagttgagggaacatatgcagtactgtgttgatcatcctgaagagataagcaaacttgcaaaggtgaaagctcaggtttctgaagttaagggtgtcatgatggagaatattgaaaaggttctggacaggggtgacaagatagaacttctggtggacaagactgagaaccttcataaccaggttagtatgatgtactacgtgctatgaagtatgtgtgtgcatctaaatgtcgttcctttatagtgtagatttcatatctatgctatagaaaggagatttatttcttttggtggctgaatcatttttgaagtggatgctaagtgtagcatattgaaaggagattcctcacttttggtgtcttcattatctctctcagaccagctagttacatccatttctatttttaaagaattgtttctatatcttacagtttccaccctctgctctcctcacaatgccaaaacaaacaaaaaaagtctaagatcctgagacccacatgttttcacttttctgtttcaattttaactttgatatggatgtggtagtgcaaatttatatttcaccatttgtgaggaaagaaatattttcttccaggcacaagatttcaggacttctggaaccagaatccgtcgaaaaatgtggctgcaaaacatgaagataaagctgattgtattgggaatattgatagcacttatcctgataatagtcctatctgtgtgtcgtgggttcaactgtggaaaatagcaccattctccgaggccttttatcatgttatttcaaccttgagattatcggagaaaagatactaatgaatggcatgagtttgtatgtaatatagatatagatatagtaaaggtcgtatgttggtcactttgatctacttataaatgcttttgaaaatataatttgggttgtcaaattgaaatttgatttccattttattt

SEQ ID NO: 250 - protein, 180 aa, Glycine max
  misc_feature: Ceres CLONE ID no.522046
  misc_feature: Bit score of 75.0 for HMM based on sequences of FIGURE 13.
  misc_feature (127)..(172): Pfam Name: Synaptobrevin Pfam Description: Synaptobrevin
  misc_feature: Functional Homolog Of Ceres CLONE ID no. 41543 at SEQ ID NO. 160
MGQKSLIYAFVSRGTVILAEYTEFSGNFNSIAFQCLQKLPATNNKFTYNCDAHTFNYLVDNGYTYCVVADESTGRQLPMAFLERVKDEFVSKYGGGKAATAPANSLNKEFGPKLREHMQYCVDHPEEISKLAKVKAQVSEVKGVMMENIEKVLDRGDKIELLVDKTENLHNQVSMMYYVL

SEQ ID NO: 251 - DNA, 998 bp, Glycine max
  misc_feature: Ceres CLONE ID no.651076
  misc_feature: Encodes the peptide sequence at SEQ ID NO 252
attccagaatggaaggaaagagtcttatagtgcctcctcctctttgacttcatccctatcttccgaattttcctagttttgaaaaatcctacacacgcttttgcttccacctcctttcctcaccttaaattaaattattgttcaacaatcaatatcaatataattcaattccttcaaattccagataccaaaaacatatattctttctctttgttttcttgtctgtggtattgtctctgagttgttaattttgttttctttcctttctcatggggcagcaatcgttgatttacagcttcgtggcgcgcggcacgatgatcctggcggagcacactgatttcagtggaaactttgcggaggtggctttgcagtgcctgcagaggctcccagcctccgacaacaaattcacctacaacgccgatggccacaccttcaactacctcacctataatggattcacttactgtgttgtggcagtagagtctgttggtcgccaacttgcaatggcctatcttgaacgcatcatggaggatttttccaagagatatggtggaggaaaagctacaacagccactgctaaaagcttaaacaaagaatttggatccaagttgaaggaacatatgcagtattgtgtggaacacccagaagaggttagcaaacttgcaaaagtgaaagctcaggtttcagaagtccaacaagttatgagggcaaacattgatcaggttcttgatcgtcaagtgaagattgacgttttagtgggtcaaactgaggaccttcgcaatcaggcgggggttttcagggagcggggagaccagataaggagaaagatgtggtatcaaaacatgaagataaagttaatagtacttgccatcgtgattgccatcattttaataattgtcttattggtcacctagaattgttacaactcgaccccttttttgtaatttaataaatatagttgtataatataaacattataaatttgtttatttgattgc

SEQ ID NO: 252 - protein, 214 aa, Glycine max
  misc_feature: Ceres CLONE ID no.651076
  misc_feature: Bit score of 101.9 for HMM based on sequences of FIGURE 13.
  misc_feature (127)..(213): Pfam Name: Synaptobrevin Pfam Description: Synaptobrevin
  misc_feature: Functional Homolog Of Ceres CLONE ID no. 41543 at SEQ ID NO. 160
MGQQSLIYSFVARGTMILAEHTDFSGNFAEVALQCLQRLPASDNKFTYNADGHTFNYLTYNGFTYCVVAVESVGRQLAMAYLERIMEDFSKRYGGGKATTATAKSLNKEFGSKLKEHMQYCVEHPEEVSKLAKVKAQVSEVQQVMRANIDQVLDRQVKIDVLVGQTEDLRNQAGVFRERGDQIRRKMWYQNMKIKLIVLAIVIAIILIIVLLVT

SEQ ID NO: 253 - protein, 219 aa, Medicago truncatula
  misc_feature: Public GI ID no.92867368
  misc_feature: Bit score of 646.8 for HMM based on sequences of FIGURE 13.
  misc_feature (123)..(211): Pfam Name: Synaptobrevin Pfam Description: Synaptobrevin
  misc_feature: Functional Homolog Of Ceres CLONE ID no. 41543 at SEQ ID NO. 160
MGILYALVARGTVVLAEFTGTTTNAAAIARQILEKIPGNNDTHVSYSQDRYIFHVKRTDGLTVLCMADDSVGRRIPFAFLEEIHQRFVRSYGRAVLTAEAYAMNDEFSRVLNQQMEYFSSDPNADRINRLKGEMSQVRNVMIENIDKVLDRGDRLELLVDKAANMQGNTFRFRKQARRFRSTVWWRNVKLTIALIVILIVIAYVVLAFVCHGPALPSCF

SEQ ID NO: 254 - protein, 267 aa, Medicago truncatula
  misc_feature: Public GI ID no.92897590
  misc_feature: Bit score of 94.4 for HMM based on sequences of FIGURE 13.
  misc_feature (131)..(173): Pfam Name: Synaptobrevin Pfam Description: Synaptobrevin
  misc_feature: Functional Homolog Of Ceres CLONE ID no. 41543 at SEQ ID NO. 160
MANNQNQKQLIYAFVSRGTVILAEFTEFSGNFNSIAFQCLQKLPSTNNKFTYNCDNHTFNYLIDNGYTYCVVADETTGRQVPMAFLERVKDDFVSKYGGEKASTAPPNSLNKEFGPKLKEHMQYCVDHPDEISKLAKVKAQVSEVKGVMMENIEKVLDRGEKIELLVDKTDNLHHQGQRQGTRLQEFWNLNPSKNVAAKHEGKADCVGNFDSTDPHNSPFCDSGIISTILCGLYCYSNLVIIQGDVNVWHVFVCNIDFKSVEVVTLF

SEQ ID NO: 255 - DNA, 991 bp, Triticum aestivum
  misc_feature: Ceres CLONE ID no.859707
  misc_feature: Encodes the peptide sequence at SEQ ID NO 256
cctccctcccctttctcctccccctgcccccgaggaaagaaagaaagaagaacagagtccacacggcagaggccagcggcggagaagcgggatgccgatcctgtacgcggtggtggcgcggggcgcgacggtgctggcggagcacagcgcggcggcgaccaacgcgggcgccgtcgcgcgccaggtcctcgagcgcctccccggcggcggcgccgacagccacgtctcctacacccaggaccgctacgtcttccacgccaagcgcaccgacggcatcaccgccctctgcatggccgacgacgccgccggacggcgtatcccatttgctttcctcgaggatatccatggaaagtttgttaagacatatggccgtgctgcactgacagctcttgcttatgcaatgaacgacgaattctcaagggttctcagtcagcaaatggactactattcaaatgaccctagtgcagatcaaatcaacctaatgaggggcgaaatcagtcaggttaggagtgttatgattgataatattgataaagtccttgaaagaggtgaccgtttagacctattggtggacaagactacaactatgcaaggaaatacggttcgattcaaaagacaagctcgccgctacagaagcacaacttggtggagaaatgtcaaactcacggccgcgttgatactcctcctgcttgtaatagtatacatcgccctcttcttcgtgtgccacggcttcaccttgccgacttgcatcaggtgaggggggccaggggcatataaattcgcctcgtggtgtgcttgtgtccatggcttgcctgtctcccagcccaggagagcgaccgttgcagcaccagtgcaaccagtcgcattgcaaaattattttttgtgtgtagagaggaaggggagggacctgagcctgctatttattctgtaattgtgacgccttggattgtgaagactccttttggaacgtaatcgagtgccttgctcattc

SEQ ID NO: 256 - protein, 221 aa, Triticum aestivum
  misc_feature: Ceres CLONE ID no.859707
  misc_feature: Bit score of 636.2 for HMM based on sequences of FIGURE 13.
  misc_feature (124)..(212): Pfam Name: Synaptobrevin Pfam Description: Synaptobrevin
  misc_feature: Functional Homolog Of Ceres CLONE ID no. 41543 at SEQ ID NO. 160
MPILYAVVARGATVLAEHSAAATNAGAVARQVLERLPGGGADSHVSYTQDRYVFHAKRTDGITALCMADDAAGRRIPFAFLEDIHGKFVKTYGRAALTALAYAMNDEFSRVLSQQMDYYSNDPSADQINLMRGEISQVRSVMIDNIDKVLERGDRLDLLVDKTTTMQGNTVRFKRQARRYRSTTWWRNVKLTAALILLLLVIVYIALFFVCHGFTLPTCIR

SEQ ID NO: 257 - DNA, 1092 bp, Triticum aestivum
  misc_feature: Ceres CLONE ID no.634176
  misc_feature: Encodes the peptide sequence at SEQ ID NO 258
ctggacccaaggtcaggtcagatcagatcagctcaggccgcctccgcttcccgactccagttccaatttcgattcccaccacgcccgcccctcgggaccgaggaggaggaggaggatggcgatcgtgtacgcgctcgtggcgcggggcacggtcgtgctggccgagttcgccgccgtctcgggcaacgccggcgccgtcgcccgtcgcatcctcgagaagctcccctccgaggccgaggcgcgcctctgcttcgcgcaggaccgctacatcttccacgtcctccgctcccccgccgacggcctcaccttcctctgcatggccaacgacaccttcggacggagagttcccttcatttatctcgaggacatccagatgaggttcatgaagaactatggcagggtcgcccattccgcgctggcctatgccatgaacgacgagtttgccagggtgctccaccagcaaatggagttcttctccagtaaccccagcgccgacacgctcaaccgcctccggggcgaagtcagcgagatacacaccgtcatggttgacaacatagagaagattcttgacagaggcgaccgcatctcgcttcttgtagacaagacctccacaatgcaggatagtggctttcacttccgcaagcaatccaagaggcttcggagagctctctggatgaagaatgtcaagcttctagcggtgttgacagcggtcattgtgctgctactttacctgatcattgcggctttctgcggaggcctatcccttccatcgtgcagatcataaaacagtagctcgacaccatacatgatgttccaagttcggctcagcttccagagcgaaagccttatgttttggtcaacagattcaaagttgagttctcgggtagattgtttttgcttatacaagtcgatatgaaatgtttgtacaaaaaccgggtctgtgtgtacagtatgaaatgtcgtttgtgcttctttgggtatgttgtggcactagttaagagttgctcggtgcactggttaatcgaaattattactgatgtatagtacctccctttctggaaaagatgtgaacactgaaaaaaaaaaaaaaaa

SEQ ID NO: 258 - protein, 222 aa, Triticum aestivum
  misc_feature: Ceres CLONE ID no.634176
  misc_feature: Bit score of 567.8 for HMM based on sequences of FIGURE 13.
  misc_feature (125)..(213): Pfam Name: Synaptobrevin Pfam Description: Synaptobrevin
  misc_feature: Functional Homolog Of Ceres CLONE ID no. 41543 at SEQ ID NO. 160
MAIVYALVARGTVVLAEFAAVSGNAGAVARRILEKLPSEAEARLCFAQDRYIFHVLRSPADGLTFLCMANDTFGRRVPFIYLEDIQMRFMKNYGRVAHSALAYAMNDEFARVLHQQMEFFSSNPSADTLNRLRGEVSEIHTVMVDNIEKILDRGDRISLLVDKTSTMQDSGFHFRKQSKRLRRALWMKNVKLLAVLTAVIVLLLYLIIAAFCGGLSLPSCRS

SEQ ID NO: 259 - DNA, 1109 bp, Triticum aestivum
  misc_feature: Ceres CLONE ID no.1041432
  misc_feature: Encodes the peptide sequence at SEQ ID NO 260
cttcctggacccaaggccagatcagatcagctcaggccgcctccgcttcccgaccccagttccaatttcgattcccacccccacccccgcccctcgggaccgaggaggaggaggaggaggaggaggatggcgatcgtgtacgcgctcgtggcgcggggcacggtcgtgctggccgagttcgccgccgtctcgggcaacgccggcgccgtcgcccgccgcatcctcgagaagctcccctccgaggccgaggcgcgcctctgcttcgcgcaggaccgctacatcttccacgtcctccgctcccccgccgacggcctcaccttcctctgcatggccaacgacaccttcggacggagagttcccttcatttatctcgaggacatccagatgaggttcatgaagaactatggcagggtcgcccattctgcgctggcctatgccatgaacgacgagttcgccagggtgttgcaccagcaaatggagttcttctccagtaaccccagtgccgacacgctcaaccgcctccggggtgaagtcagtgagatacacaccgtcatggttgacaacatagagaagattctggacagaggcgaccgcatctcgcttcttgtagacaagacctccacaatgcaggacagcggttttcacttccgcaagcaatccaagaggcttcggagagctctctggatgaagaatgtcaagcttctagcggtgttgacgggggtcattgtgctgctactttacctgatcattgctgctttctgcggaggcctatcccttccatcgtgcagatcatagaacactagctctacacctccatacatgatgttccaagttcggctcagcttccagagctaaaaccttatgttttggtcaacagattcgcagttgagttctcggtagattgtttttgctcatacaagtcgatatgaaatgtttgtacaaaaaccgggtccgtgtgtacagtatgaaatgtcgtttgtgcttcctttgggtatgttgtggcactagttaagagttgctcggtgcactggttcgtcgaaatttttactgatgtatagtacctccctttctggaaaagatgtgaacactgaacaaaaaaaaaaaaaaaa

SEQ ID NO: 260 - protein, 222 aa, Triticum aestivum
  misc_feature: Ceres CLONE ID no.1041432
  misc_feature: Bit score of 566.5 for HMM based on sequences of FIGURE 13.
  misc_feature (125)..(213): Pfam Name: Synaptobrevin Pfam Description: Synaptobrevin
  misc_feature: Functional Homolog Of Ceres CLONE ID no. 41543 at SEQ ID NO. 160
MAIVYALVARGTVVLAEFAAVSGNAGAVARRILEKLPSEAEARLCFAQDRYIFHVLRSPADGLTFLCMANDTFGRRVPFIYLEDIQMRFMKNYGRVAHSALAYAMNDEFARVLHQQMEFFSSNPSADTLNRLRGEVSEIHTVMVDNIEKILDRGDRISLLVDKTSTMQDSGFHFRKQSKRLRRALWMKNVKLLAVLTGVIVLLLYLIIAAFCGGLSLPSCRS

SEQ ID NO: 261 - DNA, 882 bp, Triticum aestivum
  misc_feature: Ceres CLONE ID no.1065203
  misc_feature: Encodes the peptide sequence at SEQ ID NO 262
atagatctctacttagcttctccgcgatacaagcccatttaaattcacatccaaccggatcgaggatttagggttcgcgaaaaaaatggcgcaacaacaatcgttgatctacagcttcgtcgctcgcgggacggtgatcctcgccgagttcactgatttcaaaggcaacttcacctccgtcgctgcacagtgcctccagaagctcccctcttccaacaacaagttcacctacacctgcgacggccacaccttcagttacctcgtcgaagatggattcacgtactgtgttgttgcggttgattctgctgggaggcagattccgatggcgtttttggagagagtgaaagaggattttagcaagagatatggtggtgggaaggctgctactgctcaggctaacagcttcaataaagagtttggctctaagctgaaagagcacatgcagtattgtatggatcaccctgatgagattagcaagcttgctaaggtgaaggctcaagtctctgaagttaaaggtgttatgatggaaaacatcgagaaggttcttgaccgtggtgagaaaattgagcttctggtggacaaaaccgagaaccttcgctctcaggcacaagacttcagaacaacggggacacagatgagaagaaagatgtggcttcagaacatgaagattaaactcatagttctcgccatcatcgtcgcactgattctcatcatcgtgctctcagtttgccatggcttcaagtgttaaagagccccatcaaagttaaaaaaactctcttgaaatctttttctcactcggtcttcgtaatctatatataatagcaaaccatttttattaatctgatgatgtcatcattttttataagaaaaaaaaaaaaaaaa

SEQ ID NO: 262 - protein, 220 aa, Triticum aestivum
  misc_feature: Ceres CLONE ID no.1065203
  misc_feature: Bit score of 179.6 for HMM based on sequences of FIGURE 13.
  misc_feature (128)..(216): Pfam Name: Synaptobrevin Pfam Description: Synaptobrevin
  misc_feature: Functional Homolog Of Ceres CLONE ID no. 41543 at SEQ ID NO. 160
MAQQQSLIYSFVARGTVILAEFTDFKGNFTSVAAQCLQKLPSSNNKFTYTCDGHTFSYLVEDGFTYCVVAVDSAGRQIPMAFLERVKEDFSKRYGGGKAATAQANSFNKEFGSKLKEHMQYCMDHPDEISKLAKVKAQVSEVKGVMMENIEKVLDRGEKIELLVDKTENLRSQAQDFRTTGTQMRRKMWLQNMKIKLIVLAIIVALILIIVLSVCHGFKC

SEQ ID NO: 263 - DNA, 1122 bp, Triticum aestivum
  misc_feature: Ceres CLONE ID no.555361
  misc_feature: Encodes the peptide sequence at SEQ ID NO 264
  misc_feature (785)..(785): n is a, c, t, g, unknown, or other
ctcccactccaccaaagcgaaaccgacctttcccccttcccctcccctcccctcccctcccgcagcagcctcgccgagatccaatccggcagcccccctcccccgccggcggcgagctccagcggagaggcggcgaagcgcgcgggaggagccatgggccagcagtcgctcatctacgcgttcgtggcccgcggcacggtggtgctggccgagtacaccgagttcaccggcaacttcaccaccatcgcctcccagtgcctcgtcaagctccccgccagcaacaacaagttcacctacaactgcgacggccacaccttcaactacctcgtcgaggacggcttcacatactgtgtggttgctgtggaatcagtggggcaacagatgccaattgctttcttggttcgggttaaggacgatttcagcaaaagatatgctggtgggaaagctgctactgctgcaccaagcagcctcaacagagagtttgggtcaaaactcaaagagcacatgcagtactgtgtagaccaccctgaagagataaacaagctcgctaaagtgcaagcacaagtttcagaagtcaagaacgtgatgatggaaaacattgagaaggttcttgatcgcggggagaagattgagctgcttgttgacaagacagagaatctccgctcacaggcccaagatttcaggcagcaaggaacacaggtgaggagaaagatgtggctacaaaacatgaagatcaagctgattgtcctgggcatcatcgtcgcgctcatcctcatcataatccngtcggtgtgccatgggttcaactgtggcaagtccaagtgaggactactcgaggtcgtgagacacattcaactgtccttatattactgctgattcgagcaaaacccatatatggtgcttagtgttctttcttctctagtgtgcgctggcccgggccgcggtgcctgtgggtgggtctgtgttttcgttgtcgtcgtgttgggatgttcgcttaccgccggatgggtggtggctgggtcggcgggtcgtgtatttttggacgctatgtatgtatagcttggatcttgacatctttgttctattgttatatgatgatgaggatgagtagtagatttactc

SEQ ID NO: 264 - protein, 223 aa, Triticum aestivum
  misc_feature: Ceres CLONE ID no.555361
  misc_feature: Bit score of 170.2 for HMM based on sequences of FIGURE 13.
  misc_feature (127)..(215): Pfam Name: Synaptobrevin Pfam Description: Synaptobrevin
  misc_feature: Functional Homolog Of Ceres CLONE ID no. 41543 at SEQ ID NO. 160
  misc_feature (211)..(211): Xaa is any aa, unknown, or other
MGQQSLIYAFVARGTVVLAEYTEFTGNFTTIASQCLVKLPASNNKFTYNCDGHTFNYLVEDGFTYCVVAVESVGQQMPIAFLVRVKDDFSKRYAGGKAATAAPSSLNREFGSKLKEHMQYCVDHPEEINKLAKVQAQVSEVKNVMMENIEKVLDRGEKIELLVDKTENLRSQAQDFRQQGTQVRRKMWLQNMKIKLIVLGIIVALILIIIXSVCHGFNCGKSK

SEQ ID NO: 265 - DNA, 1238 bp, Triticum aestivum
  misc_feature: Ceres CLONE ID no.704227
  misc_feature: Encodes the peptide sequence at SEQ ID NO 266
aaaaaaactaaggcaacgcaacaagacggaatagacccgcaaccgctgcgccctcttccggtcgattcacgttcactgcgagggggaggaggaggaggacggccagcccctgcgcgagacgagcctctacaagggcttctgcggtggctaatttcgggaggtagaagagggaggaggagccatgaacggtggtagcaagcaaacactgatatacagcttcgtggccaagggctccgtggtgctggccgagcacacggccttctctggcaacttcagcaccatcgccgtgcagtgcctccagaagctgccctccaacagcacaaggtccacctactcctgcgatggccacaccttcaacttcctcgtcgaccgtgattttgtgtttcttgtggtggccgaagaggcgctgggaaggagcgtgccgtttgtgttcctagagagggttagggaagacttcatgcagcggtatgggtccagtatcgatgaggagggacaacacccgcttgctgatgacgcggatgaggacgatttcctgtttgaggaccggtttagcatcgcctacaatcttgaccgggaattcgggccaaggttgaaggatcacatgcagtattgtattaatcatccagaggaaattagcaagctctctaaggtgaaatcacatctttcagaggttaaagggatcatgatggacaacatcgagaagatattagatcgtggcgagaagattgaacttttggtgggaaagaccgaaaccttacagtcgcaggccgacagcttccataggcatggcagagagctcaggcgcaagatgtggcttcagaacctgaggtttaagctgatggtcggtggtggcatcgcgtttttgatcctcatcctctggctaatggtttgctggggcttcaagtgctagagagttcagagtcttcattcgccctttttttccttgtcatttgatgttctgtttacggtgtcatgtgcatataatgaccaccaaattatgcttcgctatgttccgaacaaaagttatgtggtgtgagacccttaattcctcatagaccatccttatgttccataagaccatagggatctggagtactcgtgtaagctttatgagagagggggacgtcagtcgattatctgtacattctgaactgcaagcttattgcctggaccttgttttgctcagatcctcttgacgatgatccatgttgcacctagcgccaaaaaaaaaaaaaaaa

SEQ ID NO: 266 - protein, 242 aa, Triticum aestivum
  misc_feature: Ceres CLONE ID no.704227
  misc_feature: Bit score of 128.2 for HMM based on sequences of FIGURE 13.
  misc_feature (150)..(238): Pfam Name: Synaptobrevin Pfam Description: Synaptobrevin
  misc_feature: Functional Homolog Of Ceres CLONE ID no. 41543 at SEQ ID NO. 160
MNGGSKQTLIYSFVAKGSVVLAEHTAFSGNFSTIAVQCLQKLPSNSTRSTYSCDGHTFNFLVDRDFVFLVVAEEALGRSVPFVFLERVREDFMQRYGSSIDEEGQHPLADDADEDDFLFEDRFSIAYNLDREFGPRLKDHMQYCINHPEEISKLSKVKSHLSEVKGIMMDNIEKILDRGEKIELLVGKTETLQSQADSFHRHGRELRRKMWLQNLRFKLMVGGGIAFLILILWLMVCWGFKC

SEQ ID NO: 267 - DNA, 1148 bp, Zea mays
  misc_feature: Ceres CLONE ID no.392275
  misc_feature: Encodes the peptide sequence at SEQ ID NO 268
acacaataggctggcagagaggcaggcaaccagctcgggcgtgtccttcctcctccgtctccatcttggcccaaccgagcccaaacctctccccttttctccgtcctctcctagtccacacggcagacgccgccgccgggggagaggagaggaggggaggggatcggctccaagggaacaggtgagatggcaatcctgtacgcgctggtggcgcgcggcacggtggtgctggcggagcacagcgcggcagccaccaacgcgggcgctatcgcgcgccaggtcctcgagcgcctccccgacggcggcgccgacagccacgtctcctacacgcaggaccgctacgtcttccacgccaagcgcaccgacggcatcaccgcgctctgcatggccgacgacgccgccggaagacggattccctttgcatttttggaggatattcatggaaggtttgtcaagacatatggccgggctgcactaaccgctcttgcatatgcaatgaatgatgaattctcaagggtcttgagccagcaaatggactactattcaaatgaccctagtgcagatagaataaaccgcatgagaggtgaaatcaatcaggtccgtagtgttatgattgataacattgataaggttcttgaaagaggtgatcgtttggaactgctggttgacaagactgcaaatatgcaaggaaatacagttcgattcaagagacaagctcggcggttcagaaacactgtttggtggagaaatgtcaaactcacggccgcattgatacttctcctcctggtaataatatatgtcgttctagtcttcgtgtgccatggtttcaccctaccaacttgcataaggtaaggcatgatgtgcacaaagtgctttttgctgtgcatgtttgtgcctgtcaccggggggcagcagccgttgcaattgtttcttgtgtagaggaaagctacatattatgatgtgattgtgagaactcaattaaagatgtgaacttaacataaaaagtgcttcttgtgggtttggctatgaccttgtagctctatgagaattgggtgtttggattggtgtttatttgtggctattcttgtgtctgtacatgaattcagttacgacgagtattttatggctatgctaatgtaatattcttg

SEQ ID NO: 268 - protein, 221 aa, Zea mays
  misc_feature: Ceres CLONE ID no.392275
  misc_feature: Bit score of 654.1 for HMM based on sequences of FIGURE 13.
  misc_feature (124)..(212): Pfam Name: Synaptobrevin Pfam Description: Synaptobrevin
  misc_feature: Functional Homolog Of Ceres CLONE ID no. 41543 at SEQ ID NO. 160
MAILYALVARGTVVLAEHSAAATNAGAIARQVLERLPDGGADSHVSYTQDRYVFHAKRTDGITALCMADDAAGRRIPFAFLEDIHGRFVKTYGRAALTALAYAMNDEFSRVLSQQMDYYSNDPSADRINRMRGEINQVRSVMIDNIDKVLERGDRLELLVDKTANMQGNTVRFKRQARRFRNTVWWRNVKLTAALILLLLVIIYVVLVFVCHGFTLPTCIR

SEQ ID NO: 269 - protein, 221 aa, Zea mays
  misc_feature: Ceres CLONE ID no.100819945
  misc_feature: Bit score of 616.3 for HMM based on sequences of FIGURE 13.
  misc_feature (124)..(212): Pfam Name: Synaptobrevin Pfam Description: Synaptobrevin
  misc_feature: Functional Homolog Of Ceres CLONE ID no. 41543 at SEQ ID NO. 160
  misc_feature (131)..(131): Xaa is any aa, unknown, or other
  misc_feature (133)..(133): Xaa is any aa, unknown, or other
  misc_feature (183)..(183): Xaa is any aa, unknown, or other
  misc_feature (187)..(187): Xaa is any aa, unknown, or other
  misc_feature (192)..(192): Xaa is any aa, unknown, or other
  misc_feature (194)..(194): Xaa is any aa, unknown, or other
  misc_feature (204)..(204): Xaa is any aa, unknown, or other
  misc_feature (207)..(207): Xaa is any aa, unknown, or other
  misc_feature (208)..(208): Xaa is any aa, unknown, or other
  misc_feature (215)..(215): Xaa is any aa, unknown, or other
MAILYALVARGTVVLAEHSAAATNAGAIARQVLERLPDGGADSHVSYTQDRYVFHAKRTDGITALCMADDAAGRRIPFAFLEDIHGRFVKTYGRAALTALAYAMNDEFSRVLSQQMDYYSNDPSADRINRXRXEINQVRSVMIDNIDKVLERGDRLELLVDKTANMQGNTVRFKRQARRFRNXVWWXNVKLXAXLILLLLVIIXVVXXFVCHGFXLPTCIR

SEQ ID NO: 270 - DNA, 1162 bp, Zea mays
  misc_feature: Ceres CLONE ID no.282584
  misc_feature: Encodes the peptide sequence at SEQ ID NO 271
agtgtggaggggaggcagggtagcccccgcggcgccgctccgctcgaaatccccaaaaaggcaagatcaaatcaaatcagatctctccacccccagcccatccatggcgatcgtgtacgccctggtcgcgcggggcacggtggtgctggccgagttcgccgccgtctcgggcaacgccggcgccgtggcccgtcggatcctcgagaagctgccgcccgacgccgagtccaggctgtgcttcgcgcaggaccggtacatcttccacgtcctccgatccgacgccgccggcatcaccttcctctgtatggccaacgacaccttcggaacaaggatcccctttctctacctggaggacatccaaatgaggttcatgaaaaactacggcagagtcgcccactctgcgctggcttacgccatgaacgatgagttctccagagtgctccatcagcaaatggagttcttctccagcaacccaagcgccgacacactcaaccgtctccgtggagaagtcagcgagatacacaccgtcatggtcgacaacatagagaaaattcttgacagaggcgatcgcatctcgctccttgtcgacaagacatccaccatgcaagacagcgcctttcacttccgcaagcaatccaagaggctccgtagagctctttggatgaagaatgccaagcttctagttgtgttgacagttgtcatagtagtgctgctctacttgatcatttctgctttctgtggaggcctttccttgtcatcatgcagatcatgagtaacacaccagatggctttgcccctcccttaaatggagggtagaacaccatggaatgatgcctgctgtgttgagcaccggagcttccggaggcaaaaaaaaaaaggagatcgatggataccactgtggtttccagtaactgggatcagattgtacagtggacgagtggagttggccgttgctgtttttgatgtcgccatggttgtgggtgaactcaattcttaaatcgtggtgtgcttagcatctttcttgccttgtcaaactgtcgttgtgacttgtgagggatgggactagtgagttgggttttgtagagttacatggttatcaatgtgcagacatatatgtatgccgcgatgagtgttagtacatgcctactatggttatcggtgt

SEQ ID NO: 271 - protein, 222 aa, Zea mays
  misc_feature: Ceres CLONE ID no.282584
  misc_feature: Bit score of 578.8 for HMM based on sequences of FIGURE 13.
  misc_feature (125)..(213): Pfam Name: Synaptobrevin Pfam Description: Synaptobrevin
  misc_feature: Functional Homolog Of Ceres CLONE ID no. 41543 at SEQ ID NO. 160
MAIVYALVARGTVVLAEFAAVSGNAGAVARRILEKLPPDAESRLCFAQDRYIFHVLRSDAAGITFLCMANDTFGTRIPFLYLEDIQMRFMKNYGRVAHSALAYAMNDEFSRVLHQQMEFFSSNPSADTLNRLRGEVSEIHTVMVDNIEKILDRGDRISLLVDKTSTMQDSAFHFRKQSKRLRRALWMKNAKLLVVLTVVIVVLLYLIISAFCGGLSLSSCRS

SEQ ID NO: 272 - DNA, 987 bp, Zea mays
  misc_feature: Ceres CLONE ID no.1448469
  misc_feature: Encodes the peptide sequence at SEQ ID NO 273
agttaagtcttcttctctagatctctgccttcctccgatccatcgctctccgcgtcgtttttcatagaagaaaatggcgcagcaatcgtcgttgatctacagcttcgtcgctaggggcacagtaatcctcgtggagttcaccgatttcaaaggtaactttacgtccgtcgctgcacagtgcctccagaagcttccgtcctcgaacaacaagttcacctacaactgcgatggccacaccttcaattacctcgtcgaaaacggattcacttattgtgttgttgcagttgattctgctgggaggcagattctcatggcttttttggaacgggtgaaggaggatttcaataagagatatggtggtggaaaggctgctactgctcaggctaacagcttgaataaagagtttgggtcgaaactgaaagagcacatgcagtattgcatggatcatcctgatgagattagcaagcttgctaaggtgaaagctcaggtgtctgaagttaaaggtgtcatgatggaaaacattgaaaaggttcttgaccgtggtgagaaaattgaacttttggtggacaaaactgaaaaccttcgctcacaggcgcaagatttcaggacacaaggaacacagatgagaagaaagatgtggtttcagaacatgaagataaagctcattgttctagcaatcatcattgccttgatcctcatcatcgtcctctcagtctgcggtggcttcaactgtggcaaataagtctgggaacatttcttcctcctagtgattttccgtcaacatcctcagtcacttcgttgtgctgctttcgctcttttttgtggtttctaaattctctcatgctatctttatctgcttagattgtacgtctttgaaattggttttgtataggccatatatatgtatgaatgttcgacattttgccaacatttgctattattggtggtatcaacacggattcttgcgaaccaaaaaaaaaaaaaaaa

SEQ ID NO: 273 - protein, 222 aa, Zea mays
  misc_feature: Ceres CLONE ID no.1448469
  misc_feature: Bit score of 167.0 for HMM based on sequences of FIGURE 13.
  misc_feature (128)..(216): Pfam Name: Synaptobrevin Pfam Description: Synaptobrevin
  misc_feature: Functional Homolog Of Ceres CLONE ID no. 41543 at SEQ ID NO. 160
MAQQSSLIYSFVARGTVILVEFTDFKGNFTSVAAQCLQKLPSSNNKFTYNCDGHTFNYLVENGFTYCVVAVDSAGRQILMAFLERVKEDFNKRYGGGKAATAQANSLNKEFGSKLKEHMQYCMDHPDEISKLAKVKAQVSEVKGVMMENIEKVLDRGEKIELLVDKTENLRSQAQDFRTQGTQMRRKMWFQNMKIKLIVLAIIIALILIIVLSVCGGFNCGK

SEQ ID NO: 274 - DNA, 1201 bp, Zea mays
  misc_feature: Ceres CLONE ID no.241246
  misc_feature: Encodes the peptide sequence at SEQ ID NO 275
agaattccatttatttcatcctctctttttttttttccattccacgcccctcccaacactcccagacccatttccctttccttcccctccggctccgcctcctcgaccactccgacaacccccagcgcctcctctccggcgagctccacctctccaccggcggcggcgagaagcgggggggctaactaagtctgtaggctgcggcggaggtgatcccggagccggagccgagtctagggcgatggggcagcagtcgctgatctacgcgttcgtggcgcgtggcaccgtggtgctggccgagtacaccgagttcaccggcaacttcaccaccatcgccgcccagtgcctgcagaagctccccgccagcaacaacaagttcacctacaactgcgacggccacaccttcaactacctcgtcgaggacggattcacgtattgtgtagttgctgttgaatcagttgggcgacaaatccccatagctttcctggacagagttaaggaagacttcaccaaaaagtatggaggcgggaaagcagctactgctgcagcgaacagcttgaacagggagtttggatcaaagcttaaagagcacatgcagtactgtgtggaccaccctgaggaggttagcaagcttgccaaggtgaaggcccaagtctccgaagtcaaaggagttatgatggaaaacattgagaaggttcttgaccgtggcgagaagattgaactgcttgtcgacaaaactgaaaatctgcgttctcaggcacaagatttcaggcagcaggggcaccaaggtgcggcggaagatgtggctccaaaacatgaagatcaagctgatcgtgctgggcatcatcatcgcgctcatcctcatcatcatcctgtcggtgtgccatggcttcaagcgcggcagcaagtgaggagggggacttacggatggccgtgccctgccctgccctgccctggcacctgcgagaaggaggagactacatgtggagtttttttttgcttctttagtcgtcgtgttaagtcgtcctgcgccgataattcttggtggtcaccagataaagagtcattcctggtgtcggtgttgattgctgttggttggtcgggaaatgactgggtgaaccgaggggcgaagtgggaggggggttgtgtcgtgtaattttggatgccactattgtgcatgtatagccccgtgtgctgtgct

SEQ ID NO: 275 - protein, 304 aa, Zea mays
  misc_feature: Ceres CLONE ID no.241246
  misc_feature: Bit score of 99.3 for HMM based on sequences of FIGURE 13.
  misc_feature (127)..(182): Pfam Name: Synaptobrevin Pfam Description: Synaptobrevin
  misc_feature: Functional Homolog Of Ceres CLONE ID no. 41543 at SEQ ID NO. 160
MGQQSLIYAFVARGTVVLAEYTEFTGNFTTIAAQCLQKLPASNNKFTYNCDGHTFNYLVEDGFTYCVVAVESVGRQIPIAFLDRVKEDFTKKYGGGKAATAAANSLNREFGSKLKEHMQYCVDHPEEVSKLAKVKAQVSEVKGVMMENIEKVLDRGEKIELLVDKTENLRSQAQDFRQQGHQGAAEDVAPKHEDQADRAGHHHRAHPHHHPVGVPWLQARQQVRRGTYGWPCPALPCPGTCEKEETTCGVFFCFFSRRVKSSCADNSWWSPDKESFLVSVLIAVGWSGNDWVNRGAKWEGGCVV

SEQ ID NO: 276 - DNA, 1136 bp, Zea mays
  misc_feature: Ceres CLONE ID no.234443
  misc_feature: Encodes the peptide sequence at SEQ ID NO 277
aaaactccaaagacacgattgtagttggattaatttcccaccccacaaccccccaccacaagaacttgttcgatcgaattcttcttcaactacccgccgcgggaacccaaggaaggaggcaaagcaaaggcttctcgcagggtttcccgtcagcggcttctgcggcgggcgccatgaacagcagcaagcaggcgctgatttacagcttcgtggccaagggctccgtcgtgctggcggagcacacggccttctccggcaacttcagcaccgttgccgtccagtgcctccagaagcttccccccaacagcaccagatccacctactcctgtgacggccacaccttcaacttcctcgtcaaccgcggcttcgtgttcctagtggtcgccgatgaggcggccgggaggagcgtccccttcgtcttcctagagagggttagggaagacttcatgcagcggtatgggtccagtatcgatgaggaggggcagcacccgctcgctgatgatgctgatgaggatgactttctgttcgaagaccggttcagcattgcctacaaccttgaccgtgaattcggcccgaggttgaaggaccatatgcagtattgtgttaatcatccagaggaaattaacaagctctccaaggtgaaagcccacctatcggatgtcaaagggatcatgatggacaacattgagaagatattggatcgcggggagaagattgagcttttggtgggtaagacagagaccctacagtcacaggcggacagcttccacaggcatggcagagagttgaggcgaaagatgtggcttcagaacctgaggtttaagctgatggtgggtggcggcattgcggctctgatccttatcatttggctgatggtctgcaggggattcaaatgttagagcacaccaagttgctcgccttttttttttcttttcaggcgtttgatatgcacagactttcaaccaaattgtgttttcagtgtcacggtatcgcaatgtagtggacttcaatccccgcagtctttcccatgttccattacttccatatgataatggtaaaaggtaggaagctggagtacgcggtcagaactgtctggaggagatatgacatcacgacttaaatatctgtacattcct

SEQ ID NO: 277 - protein, 241 aa, Zea mays
  misc_feature: Ceres CLONE ID no.234443
  misc_feature: Bit score of 144.5 for HMM based on sequences of FIGURE 13.
  misc_feature (149)..(237): Pfam Name: Synaptobrevin Pfam Description: Synaptobrevin
  misc_feature: Functional Homolog Of Ceres CLONE ID no. 41543 at SEQ ID NO. 160
MNSSKQALIYSFVAKGSVVLAEHTAFSGNFSTVAVQCLQKLPPNSTRSTYSCDGHTFNFLVNRGFVFLVVADEAAGRSVPFVFLERVREDFMQRYGSSIDEEGQHPLADDADEDDFLFEDRFSIAYNLDREFGPRLKDHMQYCVNHPEEINKLSKVKAHLSDVKGIMMDNIEKILDRGEKIELLVGKTETLQSQADSFHRHGRELRRKMWLQNLRFKLMVGGGIAALILIIWLMVCRGFKC

SEQ ID NO: 278 - DNA, 1022 bp, Zea mays
  misc_feature: Ceres CLONE ID no.293549
  misc_feature: Encodes the peptide sequence at SEQ ID NO 279
gaacaacacgcattcctacaatcggacaatcctactccaagcattgagggacacggaggcggcgccgttcggcactgcacgctcacgggctcgcgcattagtggatactctcccccggcgccacgaaatcgtccgctctcaccaccttccatcggtccctcacgatcttgccaagaatccaagatccgcctgcggtagctagcggtcctatcttgatccgatggtgtcaccgactccgggagggaaggatgcaagggagggtggcggcaaggcggagtggatgatctacgccttcgtggcgcgcggcaccgcggtgctggcggagtacacggagttccccggcaacttccccgccatcgccgcgcaatgcctgcagcggctacccgccgggtcgtcctccgccggcaccggccctgacggccgtggcgatgcgccggcacggttcagctacgcctgtgaccgacacacattcaacttcctcttgtaccgcggctacgcctattgtgtagttgcggaggaatccgttccaaagaatgtctcagtggcatttcttgaaaggttaaaagatgacttcatgaagagatatggtggtggtaaagctgacacagctcttgcaaaatgtctaaataaagaatatggacaagttataaagcagcacattcaatatgttcttgatcattcagaggaactagataaaatgttaaaagtgcaagcccaagtttcagaagtgaaaaatataatgttagacagcatagaaaagacactgggccgtggagagaaattgagtgaactccaagacaagacttctgagctacatattcaggcccagcagttcaagaaacagggagtgaagattcgcaggaagacatggctacagaacatgaaaattaagttggtgattcttggaatccttttgctccttgtaatcatagtatgggtatctatttgtcagggctttgactgcaccaagcatgaaacataatagaaatggtacaacgctgcacaaaaaaaaaaaaaaaaaa

SEQ ID NO: 279 - protein, 253 aa, Zea mays
  misc_feature: Ceres CLONE ID no.293549
  misc_feature: Bit score of 127.3 for HMM based on sequences of FIGURE 13.
  misc_feature (156)..(244): Pfam Name: Synaptobrevin Pfam Description: Synaptobrevin
  misc_feature: Functional Homolog Of Ceres CLONE ID no. 41543 at SEQ ID NO. 160
MVSPTPGGKDAREGGGKAEWMIYAFVARGTAVLAEYTEFPGNFPAIAAQCLQRLPAGSSSAGTGPDGRGDAPARFSYACDRHTFNFLLYRGYAYCVVAEESVPKNVSVAFLERLKDDFMKRYGGGKADTALAKCLNKEYGQVIKQHIQYVLDHSEELDKMLKVQAQVSEVKNIMLDSIEKTLGRGEKLSELQDKTSELHIQAQQFKKQGVKIRRKTWLQNMKIKLVILGILLLLVIIVWVSICQGFDCTKHET

SEQ ID NO: 280 - protein, 231 aa, Aegilops tauschii
  misc_feature: Public GI ID no.109450926
  misc_feature: Bit score of 147.5 for HMM based on sequences of FIGURE 13.
  misc_feature (138)..(226): Pfam Name: Synaptobrevin Pfam Description: Synaptobrevin
  misc_feature: Functional Homolog Of Ceres CLONE ID no. 41543 at SEQ ID NO. 160
MARKGEGAGPNPPATTMIYAMVARGTLVVAEHTAYTGNFRDIAAQCLHKLPAGDSRFTYTCDGHTFTFLLHQGYAYCVVATESAGREVPLAFLERIKEEFNKRYAGGKAATATANSLTKDFGPRLKEQMQYCMDHPEEVSRLSKVQAQVSEVKGIMMENIDKVIDRGEQIDGLVTRTEQLHDHAMDFRTEGTRLRRRMWYQNMKIKLIVAGIVVAIILIIVLSICHRDHCK

SEQ ID NO: 281 - DNA, 1249 bp, Panicum virgatum
  misc_feature: Ceres CLONE ID no.1828394
  misc_feature: Encodes the peptide sequence at SEQ ID NO 282
gtgtccacgccgctgcgctgcgccccaaatccgaatcccccaaccccaaaccaaacccccaattcctcagggaggcgaattcgagtgaggtcagatcagaccccgcagccatcaggggatccaaatccaaatccatctgatcagatctctccgacccccatccccatggcgatcgtgtacgcgctggtggcgcgcggcaccgtcgtgctggccgagttcgccgccgtctcgggcaacgccggcgccgtcgcccgccgcatcctcgagaagctgccgcccgacgccgactcccgcctctgcttcgcgcaggaccgctacatcttccacgtcctccgcgccgacgccggcatcaccttcctctgcatggccaacgacaccttcggaaggaggatcccctttctctacctggaggatatccagatgaggttcatgaagaactacggcagagtcgcgcactccgcgctcgcctatgccatgaacgatgagttctccagggtcctccaccaccaaatggagttcttctccagcaaccccagcgccgacacgctcaaccgtctccgtggagaagtcagcgagatacacaccgttatggtcgacaacatagagaaaattctagacagaggtgaccgcatctcactccttgtcgacaagacatccaccatgcaagacagcgctttccacttccgcaagcaatccaagaggctccgcagagcgctttggatgaagaatgccaagcttctagctgtgttgacggttgccatagtagtgctactctacttgctcatttctgctttctgtggaggcctttccctaccatcatgcagatcatgaataatggctgtccctcgttcggagcatacacggttccccaccgtattgagcgcctgagctcgcagagccagaacggatgctttgagaagtaggcttgcaatgtggtttccagttagagggagtttgttttttgccggcatgagctttctgaagtgattcctgcaaaaacgggttcagaatgtacagtagtgaacagttgtttcaaggagcggagttgccctttgctgtacttatctctttcctgatgtggcctttcgtggatgagtctaatgtcttggattgtgcttgtgtggatgggtttggggtctagtgctgcctgctatctatatatattacatgtgtactctgcagtgaatgttaattgtatacttttgttagcagtctatcagaattaatacaaaaaaaaaaaaaaaaaaaa

SEQ ID NO: 282 - protein, 221 aa, Panicum virgatum
  misc_feature: Ceres CLONE ID no.1828394
  misc_feature: Bit score of 602.2 for HMM based on sequences of FIGURE 13.
  misc_feature (124)..(212): Pfam Name: Synaptobrevin Pfam Description: Synaptobrevin
  misc_feature: Functional Homolog Of Ceres CLONE ID no. 41543 at SEQ ID NO. 160
MAIVYALVARGTVVLAEFAAVSGNAGAVARRILEKLPPDADSRLCFAQDRYIFHVLRADAGITFLCMANDTFGRRIPFLYLEDIQMRFMKNYGRVAHSALAYAMNDEFSRVLHHQMEFFSSNPSADTLNRLRGEVSEIHTVMVDNIEKILDRGDRISLLVDKTSTMQDSAFHFRKQSKRLRRALWMKNAKLLAVLTVAIVVLLYLLISAFCGGLSLPSCRS

SEQ ID NO: 283 - DNA, 1055 bp, Panicum virgatum
  misc_feature: Ceres CLONE ID no.1803923
  misc_feature: Encodes the peptide sequence at SEQ ID NO 284
aaagaccaccgattccttggccacaaagctgaagacatttccgagcacaagagatagaggctccatcctcttcgtccatcggaatcggagaagaagaagatagccacagcctacagctacatagaatagaaacaaggaaggaataagcaaggatccatggcgcagccgccggagggagcgctgatctacgcgatggtggcgcggggcacggtggtggtggcggagcacacgtcctacgcgagcaacttccgggacatcgccgcgcagtgcctgcaccggctgccggcggggaacaaccgcttcacctacacctgcgacgcccacaccttcaacttcctcgtcgccgatggatacgcatactgcgtcgtggcgaccgagtcggctgggcggcagattcctatggccttcctggagatgatcaaggaggatttcaacaagagatacgcagggggcaaagcagctacagcgacagcaaacagcctcagccgagatttcgggccgaggcttggagatcagatgcagtactgtagggatcacccagaggaggtgagcaggctgtccagagtgaaagctcaggtggatcaagtgaaaggcatcatgatggaaaacattgacaaggtcatagatcgcggggaacaaatcgatgggctcgtcacgaggacagagcagctgcatgaccaggctgctgatttcaggcagcaaggcgtgcgggtgcgtcgcaagatgtggtaccagaacatgaagatcaagctcatcgttctcggcatcgtcatcgcgctcatcctcatcataatcctctcaatttgccatggcacatgcaagtgatccatttagctcagatgcagtagtagctggttaattagaatgtcagttttggattcggggtgatcatcacttcactgtacaggttggtccttgaggttacactccactgtgttaaccccatcaactcttgtcctgctgtttattttcttgactattcaaacaacaattttgtgttctttggttatccggcagcgcctcgctcttaattttagattttcgctctttctttc

SEQ ID NO: 284 - protein, 222 aa, Panicum virgatum
  misc_feature: Ceres CLONE ID no.1803923
  misc_feature: Bit score of 166.2 for HMM based on sequences of FIGURE 13.
  misc_feature (130)..(218): Pfam Name: Synaptobrevin Pfam Description: Synaptobrevin
  misc_feature: Functional Homolog Of Ceres CLONE ID no. 41543 at SEQ ID NO. 160
MAQPPEGALIYAMVARGTVVVAEHTSYASNFRDIAAQCLHRLPAGNNRFTYTCDAHTFNFLVADGYAYCVVATESAGRQIPMAFLEMIKEDFNKRYAGGKAATATANSLSRDFGPRLGDQMQYCRDHPEEVSRLSRVKAQVDQVKGIMMENIDKVIDRGEQIDGLVTRTEQLHDQAADFRQQGVRVRRKMWYQNMKIKLIVLGIVIALILIIILSICHGTCK

SEQ ID NO: 285 - DNA, 700 bp, Panicum virgatum
  misc_feature: Ceres CLONE ID no.2024557
  misc_feature: Encodes the peptide sequence at SEQ ID NO 286
accaaggtcctttccccccctcctccacccgcttccccaccccaaccacctccggcgagctctacaccggcggcagcggaggagcgtgggggctgatcctaggaggcgaaagagcagcggggcggagacgaggtgatggggcagcagcagctgatctacgcgttcgtggcgcggggcacggtggtgctggccgagtacaccgagttcaccggcaacttcaccaccatcgcggcccagtgcctgcagaagctccccgccagcaacaacaagttcacatacaactgcgacggccacaccttcaactacctcgtcgaggacggattcacgtattgtgtagtcgctgttgattcagtcggccggcaaatccccattgctttcctggacagagttaaggaagatttcaccaaaaaatatggtggtgggaaagcagctactgcagcagcaaacagcttgaacagggagtttggatcaaaacttaaagagcacatgcagtactgtgtggaccaccctgaggaggtcagcaagcttgccaaggtgaaagcccaagtctcagaagttaaaggagttatgatggagaatatcgagaaggttctggaccgtggggagaagattgaactgcttgttgacaagactgaaaatctgcgttctcaggcacaagatttcaggcagcagggcaccaaggtgcggcggaagatgtggc

SEQ ID NO: 286 - protein, 188 aa, Panicum virgatum
  misc_feature: Ceres CLONE ID no.2024557
  misc_feature: Bit score of 110.9 for HMM based on sequences of FIGURE 13.
  misc_feature (127)..(188): Pfam Name: Synaptobrevin Pfam Description: Synaptobrevin
  misc_feature: Functional Homolog Of Ceres CLONE ID no. 41543 at SEQ ID NO. 160
MGQQQLIYAFVARGTVVLAEYTEFTGNFTTIAAQCLQKLPASNNKFTYNCDGHTFNYLVEDGFTYCVVAVDSVGRQIPIAFLDRVKEDFTKKYGGGKAATAAANSLNREFGSKLKEHMQYCVDHPEEVSKLAKVKAQVSEVKGVMMENIEKVLDRGEKIELLVDKTENLRSQAQDFRQQGTKVRRKMW

SEQ ID NO: 287 - DNA, 1162 bp, Panicum virgatum
  misc_feature: Ceres CLONE ID no.1820364
  misc_feature: Encodes the peptide sequence at SEQ ID NO 288
aggttttccaccgaatccttgcctcttctcggaactcaccaccgcgggaaggaaggaggagggagacgaagcagaagcagaagcttctcgcagggcgttcccgttcggcggcgtccgtggcggggcgactccgggcgccatgagcagcagcaagcaggcgctgatttacagcttcgtggccaagggctccgtcgtgctggcggagcacaccgccttctccggtaacttcagcaccgtcgccgtccagtgcctccagaagctgccccccaacagcaccagatccacctactcctgcgacggccacaccttcaacttcctcgtcgaccgcggcttcgtgttcctagtggtcgcggatgaggcggccgggaggagcgtgcccttcgtcttcctagagaaggttagggaaggcttcatgcagcgatatgggtccagcatcgacgaggaggggcagcacccgctcgctgatgatgcggacgaggacgactttcttttcgaagaccgcttcagcattgcctacaaccttgaccgtgaattcggcccgacgttgaaggatcatatgcagtattgtgttaaccacccagaggaaattaacaagctctccaaggtgaaagcccacctgtcggaggtcaaagggatcatgatggataatattgagaagatattggaccgtggtgagaagattgagcttttggtgggcaagaccgagaccttacaatcacaggctgacaccttccacaggcatggcagagagctgaggcgaaagatgtggcttcagaacctaaggtttaagctgatggttggtggaggcattgcggctctgattctcatcctttggctgatggtctgcaggggattcaaatgttagatcgctcagagttgtggctcgccctctcttttttgaagtgtttgttgcgttgttgaccgtttcacatgcacataatggtcaccgaatggtgtttcagtcatgttgtgggtatcggtatcgtgtagcggatgttaattccgtgcggtccttgccgtgtttcatatgataatagtaggcagctggagtacctgtgatagataactttgtgggagaaggggataatgacgctatgacctttattatctgtacattacaaaatgcaagctcttattattggaaaaaaaaaaaaaaaaaaaa

SEQ ID NO: 288 - protein, 241 aa, Panicum virgatum
  misc_feature: Ceres CLONE ID no.1820364
  misc_feature: Bit score of 148.0 for HMM based on sequences of FIGURE 13.
  misc_feature (149)..(237): Pfam Name: Synaptobrevin Pfam Description: Synaptobrevin
  misc_feature: Functional Homolog Of Ceres CLONE ID no. 41543 at SEQ ID NO. 160
MSSSKQALIYSFVAKGSVVLAEHTAFSGNFSTVAVQCLQKLPPNSTRSTYSCDGHTFNFLVDRGFVFLVVADEAAGRSVPFVFLEKVREGFMQRYGSSIDEEGQHPLADDADEDDFLFEDRFSIAYNLDREFGPTLKDHMQYCVNHPEEINKLSKVKAHLSEVKGIMMDNIEKILDRGEKIELLVGKTETLQSQADTFHRHGRELRRKMWLQNLRFKLMVGGGIAALILILWLMVCRGFKC

SEQ ID NO: 289 - protein, 197 aa, Oryza sativa subsp. indica
  misc_feature: Public GI ID no.125554274
  misc_feature: Bit score of 531.5 for HMM based on sequences of FIGURE 13.
  misc_feature (124)..(197): Pfam Name: Synaptobrevin Pfam Description: Synaptobrevin
  misc_feature: Functional Homolog Of Ceres CLONE ID no. 41543 at SEQ ID NO. 160
MAILYAVVARGTVVLAEHSAAATNAGAVARQVLERLPGGGADSHVSYTQDRYVFHAKRTDGITALCMADEAAGRRIPFAFLEDIHGRFVKTYGRAALTSLAYGMNDEFSRVLSQQMDYYSNDPNADRINRMRGEISQVRTVMIDNIDKVLERGDRLDMLVDKTANMQGNTIRFKRQARRFRNTTWWRNVKLTYVIFL

SEQ ID NO: 290 - protein, 223 aa, Oryza sativa subsp. indica
  misc_feature: Public GI ID no.125531165
  misc_feature: Bit score of 557.5 for HMM based on sequences of FIGURE 13.
  misc_feature (129)..(214): Pfam Name: Synaptobrevin Pfam Description: Synaptobrevin
  misc_feature: Functional Homolog Of Ceres CLONE ID no. 41543 at SEQ ID NO. 160
MAIVYAVVARGTVVLAEFSAVSGNAGAVARRILEKLPPDAESRLCFAQDRYIFHVLRSPPPTAADGLTFLCMANDTFGRRIPFLYLEDIQMRFIKNYGRIAHNALAYAMNDEFSRVLHQQMEYFSSNPSADTLNRLRGEIHTVMVDNIEKILDRGERISLLVDKTSTMQDSAFHFRKQSRRLRRALWMKNAKLLAVLTAVIVLLLYLIIAAFCGGLSLPSCRS

SEQ ID NO: 291 - protein, 274 aa, Oryza sativa subsp. indica
  misc_feature: Public GI ID no.125541514
  misc_feature: Bit score of 427.0 for HMM based on sequences of FIGURE 13.
  misc_feature (173)..(228): Pfam Name: Synaptobrevin Pfam Description: Synaptobrevin
  misc_feature: Functional Homolog Of Ceres CLONE ID no. 41543 at SEQ ID NO. 160
MGRIQYAAVARGAVVMAEHGDAAFPNAGAVARQILDRLSAGDGGGGGDCNVSYTQDLHVFHVKRTDGVTALCMADDAAGRRIPFAFLEDIHGRFVKTYGRAALTALAYAMNDEFSRVLGQQMDYYSNDPNADRISRMRGEMDQYFSYLSVVKLRVDGASYKFRKNDINENFLQVRNVMIDNIDKVLERGDRLELLVDKTATMQGNTMRFKRQARRFRNTVWWRNVKLTYVHYHHSVHQTPYEHLPLPFCLPTSLWVFVFMLHTENSLIIIYFDY

SEQ ID NO: 292 - protein, 279 aa, Oryza sativa subsp. indica
  misc_feature: Public GI ID no.125557559
  misc_feature: Bit score of 100.6 for HMM based on sequences of FIGURE 13.
  misc_feature (140)..(274): Pfam Name: Synaptobrevin Pfam Description: Synaptobrevin
  misc_feature: Functional Homolog Of Ceres CLONE ID no. 41543 at SEQ ID NO. 160
MGQQSLIYAFVARGTVVLAEYTEFTGNFTTIAAQCLQKLPASNNKFTYNCDGHTFNYLVEDGFSSNRIGILGIQGLAYCVVAVESVGRQIPIAFLDRVKEDFTKRYGGGKAATAAANSLNREFGSKLKEHMQYCVDHPEEISKLAKVKAQVSEVKGVMMENIEKVLDRGEKIELLVDKTENLRSQNSGIFIQWIAMEKLLIHVSVDRMRVWSMVMKYRIMVPKVIWLTVDMAQDFRQQGTKVRRKMWLQNMKIKLIVLGIIIALILIIILSVCHGFKCK

SEQ ID NO: 293 - protein, 322 aa, Oryza sativa subsp. indica
  misc_feature: Public GI ID no.125557844
  misc_feature: Bit score of 30.7 for HMM based on sequences of FIGURE 13.
  misc_feature (252)..(315): Pfam Name: Synaptobrevin Pfam Description: Synaptobrevin
  misc_feature: Functional Homolog Of Ceres CLONE ID no. 41543 at SEQ ID NO. 160
MASPPGKKGEGGGDGGGGKAEWLIYAFVARGTAVLAEYTEFTGNFPALAAQCLQRLPASGGGGSGGGAPARFSYACDGHTFNFLLHRGYAYCVVAKESVPKNVSVAFLERLKDDFMKRYGGGKADTALAKSLNKEYGPVIKQHMQYVLDHSEEIEKTLKVQAQVSEVKNIMLENIEKVWSTFAVGCPLFFTELILMGFLFKKVIFMLVGQQEYKTTHNIMIAITLALVSSVGDLDIRIASLFIYASLWYFQTLGRGEKLSELQDKTSDLQSQAQEFKKKGVKIRRKTWLQNMKIKLVVLGILLLLVIIVWVSVCQGFDCTKH

SEQ ID NO: 294 - protein, 221 aa, Oryza sativa subsp. japonica
  misc_feature: Public GI ID no.115466694
  misc_feature: Bit score of 646.4 for HMM based on sequences of FIGURE 13.
  misc_feature (124)..(212): Pfam Name: Synaptobrevin Pfam Description: Synaptobrevin
  misc_feature: Functional Homolog Of Ceres CLONE ID no. 41543 at SEQ ID NO. 160
MAILYAVVARGTVVLAEHSAAATNAGAVARQVLERLPGGGADSHVSYTQDRYVFHAKRTDGITALCMADEAAGRRIPFAFLEDIHGRFVKTYGRAALTSLAYGMNDEFSRVLSQQMDYYSNDPNADRINRMRGEISQVRTVMIDNIDKVLERGDRLDMLVDKTANMQGNTIRFKRQARRFRNTTWWRNVKLTIALIFLLTVIIYVVLVFMCHGFTLPTCIR

SEQ ID NO: 295 - protein, 226 aa, Oryza sativa subsp. japonica
  misc_feature: Public GI ID no.115449295
  misc_feature: Bit score of 548.0 for HMM based on sequences of FIGURE 13.
  misc_feature (130)..(218): Pfam Name: Synaptobrevin Pfam Description: Synaptobrevin
  misc_feature: Functional Homolog Of Ceres CLONE ID no. 41543 at SEQ ID NO. 160
MGRIQYAAVARGAVVMAEHGDAAFPNAGAVARQILDRLSAGDGGGGGDCNISYTQDLHVFHVKRTDGVTALCMADDAAGRRIPFAFLEDIHGRFVKTYGRAALTALAYAMNDEFSRVLGQQMDYYSNDPNADRISRMRGEMDQVRNVMIDNIDKVLERGDRLELLVDKTATMQGNTMRFKRQARRFRNTVWWRNVKLTAASVFILLVIIYIVLVYMCHGFTLPSCI

SEQ ID NO: 296 - protein, 226 aa, Oryza sativa subsp. japonica
  misc_feature: Public GI ID no.115481182
  misc_feature: Bit score of 574.4 for HMM based on sequences of FIGURE 13.
  misc_feature (129)..(217): Pfam Name: Synaptobrevin Pfam Description: Synaptobrevin
  misc_feature: Functional Homolog Of Ceres CLONE ID no. 41543 at SEQ ID NO. 160
MAIVYAVVARGTVVLAEFSAVSGNAGAVARRILEKLPPDAESRLCFAQDRYIFHVLRSPPPAAADGLTFLCMANDTFGRRIPFLYLEDIQMRFIKNYGRIAHNALAYAMNDEFSRVLHQQMEYFSSNPSADTLNRLRGEVSEIHTVMVDNIEKILDRGERISLLVDKTSTMQDSAFHFRKQSRRLRRALWMKNAKLLAVLTAVIVLLLYLIIAAFCGGLSLPSCRS

SEQ ID NO: 297 - protein, 223 aa, Oryza sativa subsp. japonica
  misc_feature: Public GI ID no.20177639
  misc_feature: Bit score of 557.0 for HMM based on sequences of FIGURE 13.
  misc_feature (129)..(214): Pfam Name: Synaptobrevin Pfam Description: Synaptobrevin
  misc_feature: Functional Homolog Of Ceres CLONE ID no. 41543 at SEQ ID NO. 160
MAIVYAVVARGTVVLAEFSAVSGNAGAVARRILEKLPPDAESRLCFAQDRYIFHVLRSPPPAAADGLTFLCMANDTFGRRIPFLYLEDIQMRFIKNYGRIAHNALAYAMNDEFSRVLHQQMEYFSSNPSADTLNRLRGEIHTVMVDNIEKILDRGERISLLVDKTSTMQDSAFHFRKQSRRLRRALWMKNAKLLAVLTAVIVLLLYLIIAAFCGGLSLPSCRS

SEQ ID NO: 298 - protein, 220 aa, Oryza sativa subsp. japonica
  misc_feature: Public GI ID no.115471021
  misc_feature: Bit score of 186.7 for HMM based on sequences of FIGURE 13.
  misc_feature (127)..(215): Pfam Name: Synaptobrevin Pfam Description: Synaptobrevin
  misc_feature: Functional Homolog Of Ceres CLONE ID no. 41543 at SEQ ID NO. 160
MGQQSLIYAFVARGTVVLAEYTEFTGNFTTIAAQCLQKLPASNNKFTYNCDGHTFNYLVEDGFTYCVVAVESVGRQIPIAFLDRVKEDFTKRYGGGKAATAAANSLNREFGSKLKEHMQYCVDHPEEISKLAKVKAQVSEVKGVMMENIEKVLDRGEKIELLVDKTENLRSQAQDFRQQGTKVRRKMWLQNMKIKLIVLGIIIALILIIILSVCHGFKCK

SEQ ID NO: 299 - protein, 220 aa, Oryza sativa subsp. japonica
  misc_feature: Public GI ID no.115456011
  misc_feature: Bit score of 171.1 for HMM based on sequences of FIGURE 13.
  misc_feature (127)..(215): Pfam Name: Synaptobrevin Pfam Description: Synaptobrevin
  misc_feature: Functional Homolog Of Ceres CLONE ID no. 41543 at SEQ ID NO. 160
MGQQSLIYAFVARGTVILAEYTEFTGNFTTIASQCLMKLPASNNKFTYNCDGHTFNYLVEDGFTYCVVAVESVGRQIPIAFLDRVKDDFTKRYAGGKAATAAANSLNRDFGSKLKEHMQYCVDHPEEISKLAKVKAQVSEVKGVMMENIEKVLDRGEKIELLVDKTENLRSQAQDFRQAGTQVRRKMWLQNMKIKLIVLGIIIALILIIILSVCHGFKCK

SEQ ID NO: 300 - protein, 346 aa, Oryza sativa subsp. japonica
  misc_feature: Public GI ID no.125588290
  misc_feature: Bit score of 103.4 for HMM based on sequences of FIGURE 13.
  misc_feature (127)..(189): Pfam Name: Synaptobrevin Pfam Description: Synaptobrevin
  misc_feature: Functional Homolog Of Ceres CLONE ID no. 41543 at SEQ ID NO. 160
MGQQSLIYAFVARGTVILAEYTEFTGNFTTIASQCLMKLPASNNKFTYNCDGHTFNYLVEDGFTYCVVAVESVGRQIPIAFLDRVKDDFTKRYAGGKAATAAANSLNRDFGSKLKEHMQYCVDHPEEISKLAKVKAQVSEVKGVMMENIEKVLDRGEKIELLVDKTENLRSQAQDFRQAGTQGTRRQTLGEILMDPDGSVAARANPHALPSPTLVLANPDECSALILPSSYRKLFSSAANLRPPAYAASQLPALICGLSAQLPALCCQVINGASCGASRRGVRPSFIRSHCATATCTTSSTDGWTNGVRETVIHVKAHHFATSLGLAPPPTSPSSGGVRARGVEWP

SEQ ID NO: 301 - protein, 241 aa, Oryza sativa subsp. japonica
  misc_feature: Public GI ID no.115477799
  misc_feature: Bit score of 130.1 for HMM based on sequences of FIGURE 13.
  misc_feature (149)..(237): Pfam Name: Synaptobrevin Pfam Description: Synaptobrevin
  misc_feature: Functional Homolog Of Ceres CLONE ID no. 41543 at SEQ ID NO. 160
MNGNKQSLIYSFVAKGSVVLAEHTAFSGNFSTIAVQCLQKLPPNTSKSTYSCDGHTFNFLVDRGFVFLVVADEAVGRSVPFVFLDRVKEDFMQRYGSSIDEEGQHPLADDADDDDFLLEDRFSIAYNLDREFGPRLKDHMLYCINHPEEISKLSKVKAHLTEVKGIMMDNIEKILERGEKIELLVGKTETLQSQADSFHRHGRELRRKMWLQNLRFKLMVGGAVAALILFLWLIICGGFKC

SEQ ID NO: 302 - protein, 248 aa, Oryza sativa subsp. japonica
  misc_feature: Public GI ID no.115471385
  misc_feature: Bit score of 128.1 for HMM based on sequences of FIGURE 13.
  misc_feature (153)..(241): Pfam Name: Synaptobrevin Pfam Description: Synaptobrevin
  misc_feature: Functional Homolog Of Ceres CLONE ID no. 41543 at SEQ ID NO. 160
MASPPGKKGEGGGDGGGGKAEWLIYAFVARGTAVLAEYTEFTGNFPALAAQCLQRLPASGGGGSGGGAPARFSYACDGHTFNFLLHRGYAYCVVAKESVPKNVSVAFLERLKDDFMKRYGGGKADTALAKSLNKEYGPVIKQHMQYVLDHSEEIEKTLKVQAQVSEVKNIMLENIEKTLGRGEKLSELQDKTSDLQSQAQEFKKKGVKIRRKTWLQNMKIKLVVLGILLLLVIIVWVSVCQGFDCTKH

SEQ ID NO: 303 - protein, 273 aa, Oryza sativa subsp. japonica
  misc_feature: Public GI ID no.125599705
  misc_feature: Bit score of 94.1 for HMM based on sequences of FIGURE 13.
  misc_feature (153)..(266): Pfam Name: Synaptobrevin Pfam Description: Synaptobrevin
  misc_feature: Functional Homolog Of Ceres CLONE ID no. 41543 at SEQ ID NO. 160
MASPPGKKGEGGGDGGGGKAEWLIYAFVARGTAVLAEYTEFTGNFPALAAQCLQRLPASGGGGSGGGAPARFSYACDGHTFNFLLHRGYAYCVVAKESVPKNVSVAFLERLKDDFMKRYGGGKADTALAKSLNKEYGPVIKQHMQYVLDHSEEIEKTLKVQAQVSEVKNIMLENIEKVWSTFAVGCPLFFTELILMGFLFKKTLGRGEKLSELQDKTSDLQSQAQEFKKKGVKIRRKTWLQNMKIKLVVLGILLLLVIIVWVSVCQGFDCTKH

SEQ ID NO: 304 - protein, 179 aa, Oryza sativa subsp. japonica
  misc_feature: Public GI ID no.115489810
  misc_feature: Bit score of 71.1 for HMM based on sequences of FIGURE 13.
  misc_feature (108)..(175): Pfam Name: Synaptobrevin Pfam Description: Synaptobrevin
  misc_feature: Functional Homolog Of Ceres CLONE ID no. 41543 at SEQ ID NO. 160
MAESKLIYAMVARGTVVLAEHTAYAGNFRDIAAQCLQKLPAGDNRLTYTCDAHTFNFLIHQGYAYCVVATESSGRQIPLALLDMIKEDFNKRPRLGEQMKYCMDHPEEVSKLAKVKAQVSEVKGIMMENIDKAADFRQQGTRVRRKMWYQNMKIKLIVLGIIIALILIIILSVCHGFKC

SEQ ID NO: 305 - protein, 215 aa, Hordeum vulgare subsp. vulgare
  misc_feature: Public GI ID no.55276718
  misc_feature: Bit score of 142.5 for HMM based on sequences of FIGURE 13.
  misc_feature (122)..(210): Pfam Name: Synaptobrevin Pfam Description: Synaptobrevin
  misc_feature: Functional Homolog Of Ceres CLONE ID no. 41543 at SEQ ID NO. 160
MIYAMVARGTVVVAEHTAYTGNFRDIAGQCLHKLPAGDSRFAYNCDGHTFTFLLHQGYAYCVVATESAGREVPLAFLERIKEDFNRRYAGGKAATATANSLTKDFGPRLKEQMKYCMDHPEEVSRLSKVQAQVSEVKGIMMENIDKVIDRGEQIDGLVTRTEQLHDHALDFRTEGTRIRRRMWYQNMKIKLIVVGIVVALILIIVLSICHKKDCN

SEQ ID NO: 306 - DNA, 666 bp, Sorghum bicolor
  misc_feature: Ceres ANNOT ID no.6025568
  misc_feature: Encodes the peptide sequence at SEQ ID NO 307
atggcgatcctgtacgcgctggtggcgcgcggcacggtggtgctggcggagcacagcgcggcggccaccaacgcgggcgccatcgcgcgccaggtcctcgagcgcctccccgacggcggcgccgacagccacgtctcctacacgcaggaccgctacgtcttccacgccaagcgcaccgacggcatcaccgcgctctgcatggccgacgactccgccggaagacggattcccttcgcatttttggaagatattcacggaaggtttgtcaagacatatggccgggctgcgctgacggctcttgcatatgcaatgaatgatgaattctcaagggtcttgagccaacaaatggactactattcaaatgaccctaatgcagatagaataaaccgcatgagaggtgaaatcaatcaggtccgtagtgttatgattgataacattgataaggtccttgaaagaggtgatcgtttggaactgctggttgacaagactgcgaatatgcaaggaaatacagttcgattcaaaagacaagctcggcggttcagaaacactacttggtggagaaatgtcaaactcacggccgcattgatacttctcctcctggtaataatatatgtcgttcttgtgttcatgtgccatggtttcaccctaccaacttgcataaggtaa

SEQ ID NO: 307 - protein, 221 aa, Sorghum bicolor
  misc_feature: Ceres ANNOT ID no.6025568
  misc_feature: Bit score of 652.9 for HMM based on sequences of FIGURE 13.
  misc_feature (124)..(212): Pfam Name: Synaptobrevin Pfam Description: Synaptobrevin
  misc_feature: Functional Homolog Of Ceres CLONE ID no. 41543 at SEQ ID NO. 160
MAILYALVARGTVVLAEHSAAATNAGAIARQVLERLPDGGADSHVSYTQDRYVFHAKRTDGITALCMADDSAGRRIPFAFLEDIHGRFVKTYGRAALTALAYAMNDEFSRVLSQQMDYYSNDPNADRINRMRGEINQVRSVMIDNIDKVLERGDRLELLVDKTANMQGNTVRFKRQARRFRNTTWWRNVKLTAALILLLLVIIYVVLVFMCHGFTLPTCIR

SEQ ID NO: 308 - DNA, 687 bp, Sorghum bicolor
  misc_feature: Ceres ANNOT ID no.6091128
  misc_feature: Encodes the peptide sequence at SEQ ID NO 309
atgggcaagatcgagtacgccgtggtggcgcgcggtgcggtggtgctggcggagcactacggcgcgtcggcggcgggcggcaacgcgggcgccgtggcgaggcaggtcctcgagcgcctccccgccggcggcgccggtggcgacgactgcaacgtctcgtacacgcaggacctccacgtgttccacgtcaagcgcaccgacggcctcaccgcgctctgcatggccgacgacgccgccgggcggcgtgttccgttcgcgttcctggaggacatccacgggaggttcgtcaaggcgtacggccgcgcggcgctcaccgcgctcgcgtacgccatgaacgacgagttctccagggttctggcccagcagatggactactactccaacgacgccagcgcggacaggataaaccgcatgaggggtgagatcgaccaggtccggaacgtgatgatagacaacatcgacagggtgctggagaggggtgagcgtctggagctgctggtggacaagacggcaaccatgcaggggaacaccatgcgcttcaagcgccaagctcgccgcttcaggaacaccatgtggtggaggaacgtcaagctcaccgccgcggtgatattcatcctcaccgtaatattgtacctcgtgctcgcctacatgtgtcacggcttcaccctaccatcctgtgttccgtga

SEQ ID NO: 309 - protein, 228 aa, Sorghum bicolor
  misc_feature: Ceres ANNOT ID no.6091128
  misc_feature: Bit score of 555.3 for HMM based on sequences of FIGURE 13.
  misc_feature (131)..(219): Pfam Name: Synaptobrevin Pfam Description: Synaptobrevin
  misc_feature: Functional Homolog Of Ceres CLONE ID no. 41543 at SEQ ID NO. 160
MGKIEYAVVARGAVVLAEHYGASAAGGNAGAVARQVLERLPAGGAGGDDCNVSYTQDLHVFHVKRTDGLTALCMADDAAGRRVPFAFLEDIHGRFVKAYGRAALTALAYAMNDEFSRVLAQQMDYYSNDASADRINRMRGEIDQVRNVMIDNIDRVLERGERLELLVDKTATMQGNTMRFKRQARRFRNTMWWRNVKLTAAVIFILTVILYLVLAYMCHGFTLPSCVP

SEQ ID NO: 310 - DNA, 2869 bp, Arabidopsis thaliana
  misc_feature: Ceres LOCUS ID no.At1g32330
  misc_feature: Genomic Sequence
  misc_feature: Expected Sequence
  misc_feature: Encodes the peptide sequence at SEQ ID NO. 311
atggatgtgagcaaagtaaccacaagcgacggcggaggagattcaatggagactaagccatctcctcaacctcagcctgcggcgattctaagttcaaacgcgcctcctccgtttctgagcaagacctatgatatggttgatgatcacaatacagattcgattgtctcttggagtgctaataacaacagttttatcgtttggaaaccaccggagttcgctcgcgatcttcttcctaagaactttaagcataataatttctccagcttcgttagacagcttaatacctatgtaatcttcttccctttcccttcgccttttttttttacttcatcatttctcgattttatggattttgttccattaatgttgttcccatggttgctttatgtttctgagcagaggagttttgtatccattagaatcgatagttagtttcatgagtatgctttttagagactactttatttgcaatacttgatatcttgtgattgtttagtttagaacctcacggctttgaaatgatagatatgtgagagcgttgatgaagctgactgtacatacaaacttagggggatgagaatagagatgtatacccttttttttttgtctttgttgtctgtttgactctctgtaatcaggtttagtaatagtcgtaagatagtaataaaccttcctgaattttctcagcattcattataaaggagaagaaagaagaaatttggaataagagagcaagtctcatgttgatcatgacctgagtgcaaggttatcaactttctgttttactaatctatcattttgttgtagatgagtcaaggtttagtggagatatctcacgtctttgaaaaccttaaaaggccaatgtgatcaggagtgcctggaatagaaactagatcttaagtagatatatgggtgtttagtgttggaatatctatattgttattagtgtgactttaaatctttatctggcatgtcagttacgggaaccataggtttgctctgtacggttgcacttagattaaatactttttattcatataggctggatggagattttattgtgtatataagtagataactatataagctttgctctaaaggtcatggtgaatggagcttgtactgcataatatttagagcaggatgctcgtgatgctgcaagatggtgaatgcacttaaaggagcttgaattttctgctgacagttcttgtttgccagttattccttagttactgtctgtgtggtacatgatgtcttacatgttgggcactatttgaagcaaaattcaatctttatgagtttataccatgcagactttgacataaagattacactggtagatcatagatacttttcaccctcttagttttcagttatccctattagatattttggtttttcctcggtttgggtggtaggtaagacccataataggaacataaataaagtagttttcatgattcatatattaaattgaccatgattggtcatttacttgacttctgaattaaaattgctcttgatgcatgtgccaactgatcagttacgtcctgtatatggctgtttcaatctgtggatagttggcagttaaaagactatgtgttgaaggttttagatttgcacttctaaagctgtcggatgaattctttctcattggtcttggtggaatccattttcattccattttgcgtgtcttttcttgatacagggtttcaggaaggttgacccagatagatgggaatttgcgaatgaaggttttttaagaggtcagaagcacttgctacaatcaataactaggcgaaaacctgcccatggacagggacagggacatcagcgatctcagcactcgaatggacagaactcatctgttagcgcatgtgttgaagttggcaaatttggtctcgaagaagaagttgaaaggcttaaaagagataagaacgtccttatgcaagaactcgtcagattaagacagcagcaacagtccactgataaccaacttcaaacgatggttcagcgtctccagggcatggagaatcggcaacaacaattaatgtcattccttgcaaaggcagtacaaagccctcattttctatctcaattcttacagcagcagaatcagcaaaacgagagtaataggcgcatcagtgataccagtaagaagcggagattcaagcgagacggcattgtccgtaataatgattctgctactcctgatggacagatagtgaagtatcaacctccaatgcacgagcaagccaaagcaatgtttaaacagcttatgaagatggaaccttacaaaaccggcgatgatggtttccttctaggtaatggtacgtctactaccgagggaacagagatggagacttcatcaaaccaagtatcgggtataactcttaaggaaatgcctacagcttctgagatacagtcatcatcaccaattgaaacaactcctgaaaatgtttcggcagcatcagaagcaaccgagaactgtattccttcacctgatgatctaactcttcccgacttcactcatatgctaccggaaaataattcagagaagcctccagagagtttcatggaaccaaacctgggaggttctagtccattactagatccagatctgttgatcgatgattctttgtccttcgacattgacgactttccaatggattctgatatagaccctgttgattacggtttactcgaacgcttactcatgtcaagcccggttccagataatatggattcaacaccagtggacaatgaaacagagcaggaacaaaatggatgggacaaaactaagcatatggataatctgactcaacagatgggtctcctctctcctgaaaccttagatctctcaaggtaa

SEQ ID NO: 311 - protein, 485 aa, Arabidopsis thaliana
  misc_feature: Ceres LOCUS ID no.At1g32330
  misc_feature: Bit score of 1272.2 for HMM based on sequences of FIGURE 12.
  misc_feature (36)..(214): Pfam Name: HSF_DNA-bind Pfam Description: HSF-type DNA-binding
MDVSKVTTSDGGGDSMETKPSPQPQPAAILSSNAPPPFLSKTYDMVDDHNTDSIVSWSANNNSFIVWKPPEFARDLLPKNFKHNNFSSFVRQLNTYGFRKVDPDRWEFANEGFLRGQKHLLQSITRRKPAHGQGQGHQRSQHSNGQNSSVSACVEVGKFGLEEEVERLKRDKNVLMQELVRLRQQQQSTDNQLQTMVQRLQGMENRQQQLMSFLAKAVQSPHFLSQFLQQQNQQNESNRRISDTSKKRRFKRDGIVRNNDSATPDGQIVKYQPPMHEQAKAMFKQLMKMEPYKTGDDGFLLGNGTSTTEGTEMETSSNQVSGITLKEMPTASEIQSSSPIETTPENVSAASEATENCIPSPDDLTLPDFTHMLPENNSEKPPESFMEPNLGGSSPLLDPDLLIDDSLSFDIDDFPMDSDIDPVDYGLLERLLMSSPVPDNMDSTPVDNETEQEQNGWDKTKHMDNLTQQMGLLSPETLDLSRQNP

SEQ ID NO: 312 - protein, 341 aa, Oryza sativa subsp. indica
  misc_feature: Public GI ID no.125546035
  misc_feature: Bit score of 136.6 for HMM based on sequences of FIGURE 12.
  misc_feature (37)..(178): Pfam Name: HSF_DNA-bind Pfam Description: HSF-type DNA-binding
  misc_feature: Functional Homolog Of Ceres LOCUS ID no. At1g32330 at SEQ ID NO. 311
MNYRVVNPVKVESGPSTGVANGQPPRPMDGLADGGPPPFLTKTYDMVDDPTTDAVVSWSATNNSFVVWDPHLFGNVLLPRYFKHNNFSSFVRQLNTYGFRKVDPDKWEFANEGFLRGQKHLLKSIKRRKPPNSSPSQQSLGSFLEVGHFGYEGEIDQLKRDKHLLMAEVVKLRQEQQTQVRPASYGTELQVMHNPEFIRQLFSQSEMRKELEEFVSKKRRRRIDQGPELDSMGTGSSPEQVSQVMFEPHDPVDSLFNGVPSDLESSSVEANGGKAQQDVASSSSEHGKIKPSNGELNEDFWEDLLHEGGLDEDTRNPAIDDMNLLSQKMGYLNSSSTKSSQ

SEQ ID NO: 313 - DNA, 1233 bp, Arabidopsis thaliana
  misc_feature: Ceres CLONE ID no.125228
  misc_feature: Encodes the peptide sequence at SEQ ID NO 314
tctaaagtttagagatttttcgattatggtgaaatcgacggacggtggtggtgggtcttcttcttcttcttcttcagtggcgccgttcttgagaaaatgttacgatatggttgatgattctactactgactctataatctcatggagtccaagtgcagataatagcttcgttatcttggacaccaccgtcttctctgttcaactcttgcctaaatactttaaacacagcaatttctctagctttattcgtcagctcaatatctacggttttagaaaagttgatgcagatcgatgggagtatgcgaatgacgggtttgtgagaggtcaaaaggatttgctgaagaatgttatcaggaggaagaatgttcaaagtagtgagcagagcaaacatgagagtacaagtacaacatatgctcaggaaaagagtggattgtggaaggaagttgatattttgaaaggtgataagcaggtattggcgcaggagttgatcaaagttaggcagtatcaggaggtgacggatactaagatgttacatttagaagacagagttcaaggaatggaagagagtcagcaggagatgctttcgtttttggttatggttatgaagaatccaagtcttttagttcagttacttcagccaaaggagaaaaacacttggcgaaaagcggcggaaggagcgaagattgtggaagaagtgactgatgaaggagaatcaaactcatatggtcttcctttagtaacataccagccaccatcggacaacaatggaactgcaaagtcaaactcgaacgacgtaaatgatttcttgagaaacgccgatatgttgaagttctgcttagatgaaaaccatgtgccattgatcatacctgatctatacgatgatggagcatgggaaaagcttttgttgttgagcccttcaaggaagaagacgaagaagcaggagaacattgtgaagaaaggaaaggatgatttgacattggaggaggaggaggaggatggaacaatggaattagacaagagctatatgcttaagctgatatcagaagagatggagaaaccagatgactttgaatttggacagcttactcctgagaggtctaggaaccttgagattttgacagagcagatggaattgctggcttcaaatgaatagttgattttttgaacatatcagcctcaaaacttttgttatgtaactctataacgaacaacgaagtatgcaccggatatatc

SEQ ID NO: 314 - protein, 375 aa, Arabidopsis thaliana
  misc_feature: Ceres CLONE ID no.125228
  misc_feature: Bit score of 55.3 for HMM based on sequences of FIGURE 12.
  misc_feature (19)..(189): Pfam Name: HSF_DNA-bind Pfam Description: HSF-type DNA-binding
  misc_feature: Functional Homolog Of Ceres LOCUS ID no. At1g32330 at SEQ ID NO. 311
MVKSTDGGGGSSSSSSSVAPFLRKCYDMVDDSTTDSIISWSPSADNSFVILDTTVFSVQLLPKYFKHSNFSSFIRQLNIYGFRKVDADRWEYANDGFVRGQKDLLKNVIRRKNVQSSEQSKHESTSTTYAQEKSGLWKEVDILKGDKQVLAQELIKVRQYQEVTDTKMLHLEDRVQGMEESQQEMLSFLVMVMKNPSLLVQLLQPKEKNTWRKAAEGAKIVEEVTDEGESNSYGLPLVTYQPPSDNNGTAKSNSNDVNDFLRNADMLKFCLDENHVPLIIPDLYDDGAWEKLLLLSPSRKKTKKQENIVKKGKDDLTLEEEEEDGTMELDKSYMLKLISEEMEKPDDFEFGQLTPERSRNLEILTEQMELLASNE

SEQ ID NO: 315 - protein, 459 aa, Oryza sativa subsp. japonica
  misc_feature: Public GI ID no.115465055
  misc_feature: Bit score of 108.1 for HMM based on sequences of FIGURE 12.
  misc_feature (19)..(187): Pfam Name: HSF_DNA-bind Pfam Description: HSF-type DNA-binding
  misc_feature: Functional Homolog Of Ceres LOCUS ID no. At1g32330 at SEQ ID NO. 311
MESSNLGGGGGGGGGGGPPPFLIKTYEMVEDAATNHVVSWGPGGASFVVWNPLDFSRDLLPKYFKHNNFSSFIRQLNTYGFRKIDPERWEFANEDFIRGHTHLLKNIHRRKPVHSHSLQNQINGPLAESERRELEEEINRLKYEKSILVADLQRQNQQQYVINWQMQAMEGRLVAMEQRQKNIVASLCEMLQRRGGAVSSSLLESDHFSKKRRVPKMDLFVDDCAAGEEQKVFQFQGIGTDAPAMPPVLPVTNGEAFDRVELSLVSLEKLFQRANDACTAAEEMYSHGHGGTEPSTAICPEEMNTAPMETGIDLQLPASLHPSSPNTGNAHLHLSTELTESPGFVQSPELPMAEIREDIHVTRYPTQADVNSEIASSTDTSQDGTSETEASHGPTNDVFWERFLTETPRSCLDESERQESPKDDVKAELGCNGFHHREKVDQITEQMGHLASAEQTLHT

SEQ ID NO: 316 - protein, 457 aa, Oryza sativa subsp. indica
  misc_feature: Public GI ID no.125553080
  misc_feature: Bit score of 105.1 for HMM based on sequences of FIGURE 12.
  misc_feature (17)..(185): Pfam Name: HSF_DNA-bind Pfam Description: HSF-type DNA-binding
  misc_feature: Functional Homolog Of Ceres LOCUS ID no. At1g32330 at SEQ ID NO. 311
MESSNLGGGGGGGGGPPPFLIKTYEMVEDAATNHVVSWGPGGASFVVWNPLDFSRDLLPKYFKHNNFSSFIRQLNTYGFRKIDPERWEFANEDFIRGHTHLLKNIHRRKPVHSHSLQNQINGPLAESERRELEEEINRLKYEKSILVADLQRQNQQQYVINWQMQAMEGRLVAMEQRQKNIVASLCEMLQRRGGAVSSSLLESDHFSKKRRVPKMDLFVDDCAAGEEQKVFQFQGIGTDAPAMPPVLPVTNGEAFDRVELSLVSLEKLFQRANDACTAAEEMYSHGHGGTEPSTAICPEEMNTAPMETGIDLQLPASLHPSSPNTGNAHLHLSTELTESPGFVQSPELPMAEIREDIHVTRYPTQADVNSEIASSTDTSQDGTSETEASHGPTNDVFWERFLTETPRSCLDESERQESPKDDVKAELGCNGFHHREKVDQITEQMGHLASAEQTLHT

SEQ ID NO: 317 - protein, 482 aa, Arabidopsis thaliana
  misc_feature: Public GI ID no.8920606
  misc_feature: Bit score of 1258.2 for HMM based on sequences of FIGURE 12.
  misc_feature (36)..(214): Pfam Name: HSF_DNA-bind Pfam Description: HSF-type DNA-binding
  misc_feature: Functional Homolog Of Ceres LOCUS ID no. At1g32330 at SEQ ID NO. 311
MDVSKVTTSDGGGDSMETKPSPQPQPAAILSSNAPPPFLSKTYDMVDDHNTDSIVSWSANNNSFIVWKPPEFARDLLPKNFKHNNFSSFVRQLNTYGFRKVDPDRWEFANEGFLRGQKHLLQSITRRKPAHGQGQGHQRSQHSNGQNSSVSACVEVGKFGLEEEVERLKRDKNVLMQELVRLRQQQQSTDNQLQTMVQRLQGMENRQQQLMSFLAKAVQSPHFLSQFLQQQNQQNESNRRISDTSKKRRFKRDGIVRNNDSATPDGQIVKYQPPMHEQAKAMFKQLMKMEPYKTGDDGFLLGNGTSTTEGTEMETSSNQVSGITLKEMPTASEIQSSSPIETTPENVSAASEATENCIPSPDDLTLPDFTHMLPENNSEKPPESFMEPNLGGSSPLLDPDLLIDDSLSFDIDDFPMDSDIDPVDYGLLERLLMSSPVPDNMDSTPVDNETEQEQNGWDKTKHMDNLTQQMGLLSPETLDLSR

SEQ ID NO: 318 - DNA, 1533 bp, Populus balsamifera subsp. trichocarpa
  misc_feature: Ceres ANNOT ID no.1538958
  misc_feature: Encodes the peptide sequence at SEQ ID NO 319
atggatggaataaacaccactgcaagcggtggcgacgcctctactagcggcggtgtagcactagcggcgccggtgccgatggcgtcccagtcaaattctccgccgccatttctgagtaagacttacgacatggtagacgacccggagaccgacgccgtggtgtcttggagttcgacgaataatagttttgtggtttggaatccgccggagttcgctcgcgatcttttgccgaagtattttaagcataataacttctccagctttgttaggcaacttaatacatacggttttcgaaaggtggatccagaccgttgggaattcgccaatgaaggatttttgaggggtcagaagcacctgcttaggactatcagtcggcgaaaacctgcccatggacatactaatcaacagccgcaacaagctcgtggacagaactcaactgttggcgcttgtgttgaggttggaaaatttgggcttgaggaagaggtagagaggcttaagagggacaagaatgttcttatgcaagaacttgttaggttgaggcagcagcaacagtccacggatagccagttgcaaaccatggtgcagcgacttcaagggatggagcagcgtcagcaacagatgatgtcattcctggcaaaggctatgcagagcccgggcttcctggctcagtttgtacagcagcaaaatgaaagcagcaggcgcataacagaagccaacaaaaaacgaaggctcaagcctgaggatgtttctgagaatgagggttctagtgctcctgatggacagattgtgaagtatcagcctcagatgaacgaggcagccaaagcaatgctcaggcaggtcatgaaaatggatgctccttctaggttggaatcttatgacaccaatcttgatggcttcctgattggtaatggttcaccatcatctagtgcaaaagacagcggaagctcttcaagccgcatgtcaggagtgactcttcaagaggtcccagcagcttcagggatttccggacatggccccatggctgccatatctgaaatacaatcttccccacacattgctagctcagaaaaggctacagcttctcagtttccggaaagtatactggttggaggacaaggagcaccctccatacctattccacaggcagatataatcatgccccaggtttctcaaaagccagaaatggtgccagaaattattgctgatattcctggtgaagattacatggaaccagagacaagcagtgatgtgttcctagatccagcttcacttggaattaatgatacaatacccatagatattgacaacatctcccctgatcctgatatcgatgctttgcttgataattctagcttctgggatgaccttcttgcgcagagtccagtgcctgaggatattgaatcaagttctgtggagggtaaagccaatggaaatgatgtacatcaaattataaacgggtgggacaaagctcagcatatggatcagctgacagaacaaatgggacttctctcatcagatcgcaagcagctttaa

SEQ ID NO: 319 - protein, 510 aa, Populus balsamifera subsp. trichocarpa
  misc_feature: Ceres ANNOT ID no.1538958
  misc_feature: Bit score of 1418.7 for HMM based on sequences of FIGURE 12.
  misc_feature (35)..(211): Pfam Name: HSF_DNA-bind Pfam Description: HSF-type DNA-binding
  misc_feature: Functional Homolog Of Ceres LOCUS ID no. At1g32330 at SEQ ID NO. 311
MDGINTTASGGDASTSGGVALAAPVPMASQSNSPPPFLSKTYDMVDDPETDAVVSWSSTNNSFVVWNPPEFARDLLPKYFKHNNFSSFVRQLNTYGFRKVDPDRWEFANEGFLRGQKHLLRTISRRKPAHGHTNQQPQQARGQNSTVGACVEVGKFGLEEEVERLKRDKNVLMQELVRLRQQQQSTDSQLQTMVQRLQGMEQRQQQMMSFLAKAMQSPGFLAQFVQQQNESSRRITEANKKRRLKPEDVSENEGSSAPDGQIVKYQPQMNEAAKAMLRQVMKMDAPSRLESYDTNLDGFLIGNGSPSSSAKDSGSSSSRMSGVTLQEVPAASGISGHGPMAAISEIQSSPHIASSEKATASQFPESILVGGQGAPSIPIPQADIIMPQVSQKPEMVPEIIADIPGEDYMEPETSSDVFLDPASLGINDTIPIDIDNISPDPDIDALLDNSSFWDDLLAQSPVPEDIESSSVEGKANGNDVHQIINGWDKAQHMDQLTEQMGLLSSDRKQL

SEQ ID NO: 320 - protein, 502 aa, Medicago sativa
  misc_feature: Public GI ID no.115521213
  misc_feature: Bit score of 1404.6 for HMM based on sequences of FIGURE 12.
  misc_feature (31)..(207): Pfam Name: HSF_DNA-bind Pfam Description: HSF-type DNA-binding
  misc_feature: Functional Homolog Of Ceres LOCUS ID no. At1g32330 at SEQ ID NO. 311
MDGASGGSGGGEGSTTQIPAPTPMLNANAPPPFLSKTYDMVDDPSTDAIVSWSATNNSFVVWDPPEFARDLLPKFFKHNNFSSFVRQLNTYGFRKVDPDRWEFANEGFLRGQKQLLKSISRRKPAHGHTQQQAQQPHGQSSSVGACVEVGKFGLEEEVERLKRDKNVLMQELVRLRQQQQTTDGQLQTMVQRLQGMEQRQQQMMSFLAKAVQSPGFFAQFVQQQNDSNRRITEVNKKRRLKQDGIAETTEQATPPDGQIVKYQPMMNETAKAMLRKIMKWDTPRVESFNKNPDNYLIGDGTSPSSAMDSSSSTSWNSGVTLQEVPPSSVQSTQIPVSTGTQGHIPSAEKPEILSVPQAAASANVMKDGTHAASTIPTSQADVIMPDIPSVPEIVPKSILDIPEDNYMAPETDDGFMDPSSLGSLPIDLDCLSPGADIDDLLSNSIWDDLLQTPIPEDFEANIDEISRGNEVQPTENGWDNNTQPLDQLTEQMGLLSSDAKRI

SEQ ID NO: 321 - protein, 510 aa, Glycine max
  misc_feature: Public GI ID no.42415865
  misc_feature: Bit score of 1425.6 for HMM based on sequences of FIGURE 12.
  misc_feature (29)..(204): Pfam Name: HSF_DNA-bind Pfam Description: HSF-type DNA-binding
  misc_feature: Functional Homolog Of Ceres LOCUS ID no. At1g32330 at SEQ ID NO. 311
MDGRASSSVGGEASPAPAPVPITNANAPPPFLSKTYEMVEDPSTDSIVSWSPTNNSFVVWNPPEFARDLLPKHFKHNNFSSFVRQLNTYGFRKVDPDRWEFANEGFLRGQKHLLKTITRRKPAHGHNQQAQQAHGQSSSVGACVEVGKFGLEEEVEILKRDKNVLMQELVRLRQQQQATDNQLQSMVQRLQGMEQRQQQMMSFLAKAVQSPGFLAQFVQQQNESSRRITEANKKRRLKQEGIGEMEHTAASDGQIVKYQPLINEAAKAMLRQMMKLDTSRLESFSNNADNYLIGDHSSSSGATDRGNSLSRTSGVTLQVVPLTTIQSSHIPSATGIGDDPSTGKSEILSTPQVVACDEVTKAQYSNVNVSVGESNAPAIPATQTDEIMRDLSTIPDIVAGNILDIPQENYMAPETGGEGYMDPTSFGVNVSLPIDFDSISPEADIDDLLNNPHFWDDILRTPVSEEIDTNDAEVFKENEVQPMENGLDESQNMDQLTEQMGLLSSDAKRI

SEQ ID NO: 322 - protein, 527 aa, Lycopersicon peruvianum
  misc_feature: Public GI ID no.729775
  misc_feature: Bit score of 1421.4 for HMM based on sequences of FIGURE 12.
  misc_feature (40)..(225): Pfam Name: HSF_DNA-bind Pfam Description: HSF-type DNA-binding
  misc_feature: Functional Homolog Of Ceres LOCUS ID no. At1g32330 at SEQ ID NO. 311
MEPNSSGSGKAAVGDGGGGGAPMLQPAPAPAPMPSANAPPPFLVKTYDMVDDPSTDKIVSWSPTNNSFVVWDPPEFAKDLLPKYFKHNNFSSFVRQLNTYGFRKVDPDRWEFANEGFLRGQKHLLKSISRRKPAHGHAQQQQQPHGHAQQQMQPPGHSASVGACVEVGKFGLEEEVERLKRDKNVLMQELVRLRQQQQSTDNQLQGMVQRLQGMELRQQQMMSFLAKAVNSPGFLAQFVQQQNESNKRIAEGSKKRRIKQDIESQDPSVTPADGQIVKYQPGINEAAKAMLRELSKLDSSPRLENFSNSPESFLIGDGSPQSNASSGRVSGVTLQEVPPTSGKPLLNTASAIAGQSLLPATSEMQSSHLGTCSEIINNQLSNIIPLVGGEDLHPGSLSASDMIMPELSQLQGILPENNTDVIGCDSFMDTIAVEGKMGLDIGSLSPGADIDWQSGLLDEIQEFPSVGDPFWEKFLQSPSSPDAAMDDDISNTSETKPQINGWDKTQNMEHLTEQMGATNIKQQKHMI

SEQ ID NO: 323 - protein, 527 aa, Solanum lycopersicum
  misc_feature: Public GI ID no.11386827
  misc_feature: Bit score of 1432.5 for HMM based on sequences of FIGURE 12.
  misc_feature (38)..(223): Pfam Name: HSF_DNA-bind Pfam Description: HSF-type DNA-binding
  misc_feature: Functional Homolog Of Ceres LOCUS ID no. At1g32330 at SEQ ID NO. 311
MEPNSYGSGKAAVGDGVGAPMLQTAPAPAPIPSANAPPPFLVKTYDMVDDPSTDKIVSWSPTNNSFVVWDPPEFAKDLLPKYFKHNNFSSFVRQLNTYGFRKVDPDRWEFANEGFLRGQKHLLKSISRRKPAHGHAQQQQQPHGNAQQQMQPPGHSASVGACVEVGKFGLEEEVERLKRDKNVLMQELVRLRQQQQATDNQLQGMVQRLQGMELRQQQMMSFLAKAVNRPGFLAQFVQQQNESNKRIAEGSKKRRIKQDIESQDPSVTPADGQIVKYQPGINEAAKAMLRELSKLDSSPRLDNFSNSPESFLIGDGSPQSNASSGRVSGVTLQEVPPTSGKPLLNTASAIAGQSLLPATSEMQSSHLGTCSEIINNQLSNIIPLVGGEDLHPGSLSASDMIMPELSQLQGILPENNTDVIGCDSFMDTSAVEGKVGLDIIGSCLSPGADIDWQSGLLDEIEEFPSVGDPFWEKFLQSPCSPDAAMDDDISNTSETKPQINGWDKTQNMEHLTEQMGATNIKQQKHMI

SEQ ID NO: 324 - DNA, 1815 bp, Gossypium hirsutum
  misc_feature: Ceres CLONE ID no.1919643
  misc_feature: Encodes the peptide sequence at SEQ ID NO 325
cttagcttttactctttcaaatcttagctcttcccatggcaaattcgctcactcgctgatcttcaaatccatatttattttcttcgaaaaccctttttcttgttttttcttatcactaaaatcccgaaatggattctcttcatgattcaatatcagcggcgaacgcggcggccgctgccaacggcaacaccgtgccgccgtttctcagcaaaacctacgatgtggtgaatgacccatcgaccgactccgtcgtgtcgtggagtagcggtaataacagttttgttgtctggaaagtgccggagtttgcaagggatcttttgcccaagtattttaagcacaataacttctccagctttgtcaggcagctcaatacatatggttttagaaaagttgaccctgaccgctgggaattttctaatgaggggttcctacgaggtcagaaacatctattgaaaactatcagcaggcggaaacctcctaatgtccagagtaatcagcaacctcaagttcagaactcatctgttggagcttgcattgaggtcgggaagtttggtattgaagaggaggttgaaagacttaagagggacaagaatgttctcatgcaggaacttgttaggttgaggcagcagcagcaaacaacggataaccagttgcaaactgttggccagcgtgtacaggtgatggagcagaggcagcagcaaatgatgtcttttcttgccaaggctatgcaaagtccgagtttcttaggccagcttgtgcagcagcaaaatgaaagcaacaggcgcattactggagcaaacaagaagaggagactccccaggcaggatgaagaaaatttagctggtgaaaatggtgccgtatctgctaaagggcagattgtaaagtttcagccttcactgaatggggcagcgaaggcgatgctgcaccagataatgaagatgaatacatcacctagtttggacccttcgataaataattcgggttcattcttgattgatggtgttcctccttccaatgcaccggacagcaggagctcgtccagtcggatttcaggtgtgacactttcagaagtccaaccagcttctgcgcaatcttatctgcaagcggaatcaggttttcctgacacttgtctgtcagctgccgctcatttaacatccgagcatactaatgtggatcaaatttctcggataaatgagcataagtctcagaaacatggagttattccaaatgtttctcaaatgcaaggaactatgcctgatagcacagttggacttactgacagaagtttggcaggatctgagagaggcaatgcggagtatcttgatccactgttagacgttttggatggtacaatgcccgtagaaactgatgatttttctgccgatcatgatatggacatcttactcgatggatctcctgaacttccagcaattaatgacgttttttgggagaagtttcttgcaacaagccctctaaccggggacaccgatgaaattagttcaagctcacttgaaaatggtgcaaacctggaacaacagcaagcaccggtgaggcaagagaacggatgggatggaattcatcatatgaaccatcttaccgagcaaatgggccttctttcatcaaatggacagatcagaggttgatgatgatctatgatgcggtcaagaaaagctttttaattcaaagagaaatggtttgttgttgaaaggggttatttttggtgttactacatgtaccaataacataaatgcattggaaatggttatccaaatacatatgtatgatgtttctcgacaaaaaaaaaaaaaaaaaaaa

SEQ ID NO: 325 - protein, 504 aa, Gossypium hirsutum
  misc_feature: Ceres CLONE ID no.1919643
  misc_feature: Bit score of 812.8 for HMM based on sequences of FIGURE 12.
  misc_feature (23)..(196): Pfam Name: HSF_DNA-bind Pfam Description: HSF-type DNA-binding
  misc_feature: Functional Homolog Of Ceres LOCUS ID no. At1g32330 at SEQ ID NO. 311
MDSLHDSISAANAAAAANGNTVPPFLSKTYDVVNDPSTDSVVSWSSGNNSFVVWKVPEFARDLLPKYFKHNNFSSFVRQLNTYGFRKVDPDRWEFSNEGFLRGQKHLLKTISRRKPPNVQSNQQPQVQNSSVGACIEVGKFGIEEEVERLKRDKNVLMQELVRLRQQQQTTDNQLQTVGQRVQVMEQRQQQMMSFLAKAMQSPSFLGQLVQQQNESNRRITGANKKRRLPRQDEENLAGENGAVSAKGQIVKFQPSLNGAAKAMLHQIMKMNTSPSLDPSINNSGSFLIDGVPPSNAPDSRSSSSRISGVTLSEVQPASAQSYLQAESGFPDTCLSAAAHLTSEHTNVDQISRINEHKSQKHGVIPNVSQMQGTMPDSTVGLTDRSLAGSERGNAEYLDPLLDVLDGTMPVETDDFSADHDMDILLDGSPELPAINDVFWEKFLATSPLTGDTDEISSSSLENGANLEQQQAPVRQENGWDGIHHMNHLTEQMGLLSSNGQIRG

SEQ ID NO: 326 - protein, 506 aa, Oryza sativa subsp. japonica
  misc_feature: Public GI ID no.115456675
  misc_feature: Bit score of 1316.1 for HMM based on sequences of FIGURE 12.
  misc_feature (36)..(210): Pfam Name: HSF_DNA-bind Pfam Description: HSF-type DNA-binding
  misc_feature: Functional Homolog Of Ceres LOCUS ID no. At1g32330 at SEQ ID NO. 311
MEAAVAAAAAAAGAVTTAVAPPPGAAVSNGVATAPPPFLMKTYEMVDDPATDAVVSWGPGNNSFVVWNTPEFARDLLPKYFKHSNFSSFVRQLNTYGFRKVDPDRWEFANEGFLRGQKHLLKTINRRKPTHGNNQVQQPQLPAAPVPACVEVGKFGMEEEIEMLKRDKNVLMQELVRLRQQQQTTDHQLQTLGKRLQGMEQRQQQMMSFLAKAMHSPGFLAQFVQQNENSRRRIVASNKKRRLPKQDGSLDSESASLDGQIVKYQPMINEAAKAMLRKILKLDSSHRFESMGNSDNFLLENYMPNGQGLDSSSSTRNSGVTLAEVPANSGLPYVATSSGLSAICSTSTPQIQCPVVLDNGIPKEVPNMSAVPSVPKAVAPGPTDINILEFPDLQDIVAEENVDIPGGGFEMPGPEGVFSLPEEGDDSVPIETDEILYNDDTQKLPAIIDSFWEQFLVASPLSVDNDEVDSGVLDQKETQQGNGWTKAENMANLTEQMGLLSSHHTG

SEQ ID NO: 327 - protein, 483 aa, Arabidopsis thaliana
  misc_feature: Public GI ID no.429155
  misc_feature: Bit score of 943.9 for HMM based on sequences of FIGURE 12.
  misc_feature (51)..(234): Pfam Name: HSF_DNA-bind Pfam Description: HSF-type DNA-binding
  misc_feature: Functional Homolog Of Ceres LOCUS ID no. At1g32330 at SEQ ID NO. 311
MFVNFKYFSFFIRTKMDGVTGGGTNIGEAVTAPPPRNPHPATLLNANSLPPPFLSKTYDMVEDPATDAIVSWSPTNNSFIVWDPPEFSRDLLPKYFKHNNFSSFVRQLNTYGFRKVDPDRWEFANEGFLRGQKHLLKKISRRKSVQGHGSSSSNPQSQQLSQGQGSMAALSSCVEVGKFGLEEEVEQLKRDKNVLMQELVKLRQQQQTTDNKLQVMVKHLQVMEQRQQQIMSFLAKAVQNPTFLSQFIQKQTDSNMHVTEANKKRRLREDSTAATESNSHSHSLDASDGQIVKYQPLRNDSMMWNMMKTDDKYPFLDGFSSPNQVSGVTLQEVLPTTSGQSQAYASVPSGQPLSYLPSTSTSLPDTIMPETSQIPQLTRESINDFPTENYMDTEKNVPEAFISPSPFLDGGSVPIQLEGIPEDPEIDELMSNFEFLEEYMPESPVFGDATTLENNNNNNNNTNGRHMDKLIEELGLLTSETEH

SEQ ID NO: 328 - DNA, 1731 bp, Arabidopsis thaliana
  misc_feature: Ceres CLONE ID no.1194199
  misc_feature: Encodes the peptide sequence at SEQ ID NO 329
gatgtttgtaaatttcaaatacttctctttctttatccgtacgaaaatggacggtgttaccggcggaggaacgaatatcggcgaggctgtgacggcgccaccaccgcggaatccgcatccagcgactttacttaatgcgaactctttaccgccccctttccttagcaagacgtatgacatggtggaagatccggcgacggacgcgattgtctcatggagtccgacgaacaatagcttcattgtttgggatccaccggagttttctcgtgatcttctacctaaatacttcaaacacaacaatttctccagctttgttcgccagttaaacacctatggttttaggaaagtggatccagatcgatgggaatttgctaatgaaggtttcttaagaggtcaaaaacatctattgaagaagataagccggagaaaatctgttcagggacatggtagtagtagtagtaatccacaatctcagcaattatctcagggtcaaggttcaatggctgcattatcttcatgtgttgaggttgggaaatttgggttagaggaagaagttgaacagcttaaaagagacaaaaacgtgttgatgcaggaactcgttaagttacgccagcagcaacaaacaacagataataaacttcaggttatggttaaacatcttcaggttatggagcagaggcaacaacagattatgtctttccttgctaaagctgtacagaatcctactttcctctctcagtttatacagaagcagactgatagtaatatgcatgtaaccgaggccaataagaagcggagactcagagaggatagtactgctgctactgagagtaatagtcatagccatagcttggatgcatcagatggacagatagttaagtatcagccacttagaaacgattcaatgatgtggaacatgatgaaaacagatgataagtatccgtttcttgacgggttctcatctccaaaccaggtatcaggagtcactcttcaagaggtactacccacaacttcaggacagtcacaggcatatgcatctgtaccatcaggacagcctttatcatacttaccctctacttcaacttctctcccggataccataatgccagagacttcccagataccacaattgacacgagggagtatcaacgacttccctacagaaaactacatggatacagagaagaatgttccagaggcattcatctctccaagcccattccttgatggtggttcagtcccgattcagcttgagggaatacccgaagaccccgagattgatgaactaatgagtaactttgaattccttgaagaatatatgccagaaagcccagtttttggagatgcaactacactagagaacaacaacaacaacaacaacaacaacaacaacaacaacaacaacacaaatggtagacatatggataagcttatagaagaattgggtcttctcacatcagaaacagaacactagtaaaggattatgtttagtatccattgtaaagtctttctctactaacattatcgttaggactcagtagtacggttgcaactttgtgcagaaatctttccattggataatagaagagttgtatttattattaaaaagaaaatgccattttttctaatttattgtagaaagtgactactttgtccaatcatatttgtagtcctttttcgataagaaaaacagagttggaattttcccgaaaaaaaaaaaaaaaaaaaaaa

SEQ ID NO: 329 - protein, 490 aa, Arabidopsis thaliana
  misc_feature: Ceres CLONE ID no.1194199
  misc_feature: Bit score of 945.5 for HMM based on sequences of FIGURE 12.
  misc_feature (51)..(234): Pfam Name: HSF_DNA-bind Pfam Description: HSF-type DNA-binding
  misc_feature: Functional Homolog Of Ceres LOCUS ID no. At1g32330 at SEQ ID NO. 311
MFVNFKYFSFFIRTKMDGVTGGGTNIGEAVTAPPPRNPHPATLLNANSLPPPFLSKTYDMVEDPATDAIVSWSPTNNSFIVWDPPEFSRDLLPKYFKHNNFSSFVRQLNTYGFRKVDPDRWEFANEGFLRGQKHLLKKISRRKSVQGHGSSSSNPQSQQLSQGQGSMAALSSCVEVGKFGLEEEVEQLKRDKNVLMQELVKLRQQQQTTDNKLQVMVKHLQVMEQRQQQIMSFLAKAVQNPTFLSQFIQKQTDSNMHVTEANKKRRLREDSTAATESNSHSHSLDASDGQIVKYQPLRNDSMMWNMMKTDDKYPFLDGFSSPNQVSGVTLQEVLPTTSGQSQAYASVPSGQPLSYLPSTSTSLPDTIMPETSQIPQLTRGSINDFPTENYMDTEKNVPEAFISPSPFLDGGSVPIQLEGIPEDPEIDELMSNFEFLEEYMPESPVFGDATTLENNNNNNNNNNNNNNNTNGRHMDKLIEELGLLTSETEH

SEQ ID NO: 330 - protein, 495 aa, Arabidopsis thaliana
  misc_feature: Public GI ID no.15236631
  misc_feature: Bit score of 930.1 for HMM based on sequences of FIGURE 12.
  misc_feature (51)..(234): Pfam Name: HSF_DNA-bind Pfam Description: HSF-type DNA-binding
  misc_feature: Functional Homolog Of Ceres LOCUS ID no. At1g32330 at SEQ ID NO. 311
MFVNFKYFSFFIRTKMDGVTGGGTNIGEAVTAPPPRNPHPATLLNANSLPPPFLSKTYDMVEDPATDAIVSWSPTNNSFIVWDPPEFSRDLLPKYFKHNNFSSFVRQLNTYGFRKVDPDRWEFANEGFLRGQKHLLKKISRRKSVQGHGSSSSNPQSQQLSQGQGSMAALSSCVEVGKFGLEEEVEQLKRDKNVLMQELVKLRQQQQTTDNKLQVLVKHLQVMEQRQQQIMSFLAKAVQNPTFLSQFIQKQTDSNMHVTEANKKRRLREDSTAATESNSHSHSLEASDGQIVKYQPLRNDSMMWNMMKTDDKYPFLDGFSSPNQVSGVTLQEVLPITSGQSQAYASVPSGQPLSYLPSTSTSLPDTIMPETSQIPQLTRESINDFPTENFMDTEKNVPEAFISPSPFLDGGSVPIQLEGIPEDPEIDELMSNFEFLEEYMPESPVFGDATTLENNNNNNNNNNNNNNNNNNNNTNGRHMDKLIEELGLLTSETEH

SEQ ID NO: 331 - DNA, 1491 bp, Populus balsamifera subsp. trichocarpa
  misc_feature: Ceres ANNOT ID no.1523420
  misc_feature: Encodes the peptide sequence at SEQ ID NO 332
atggatagtgggaataataacacgaacacggtgcctccatttctaagcaagacctacgacatggtagacgacccgtcgacggattcagtggtgtcatggagtagcagcaataacagttttgtggtctggaatgtcccagagtttcaaacagatcttttgcctaaatacttcaagcacagtaacttctccagctttgtcaggcaattgaatacttacggtttcaggaaggttgatcctgatcgctttgaatttgcaaatgaggggttcttaaggggccaaaaacaccttctgaggagtatatctaggaaaaaacctgttcatggtaacctaccacctcaagttcagagctcttcggttaccacatgcgttgaggttgggaagtttgggctcgaggaagaggttgaaagacttaaacgagacaaaaatgttctcatgcaggaacttgttagactgaggcagcagcagcaagccacagatcaccagttgcacactgtgggccaacgtgtacagggaatggagcagcgacagcaacaaatgatgtcattccttgcgaaggccatgcagaatccaggcttcttaagtcagcttgtacagcagcaaaatgaaagcaacagacgcattgctggtgccagtaaaaagaggagacttccaaggcaggaggaagagaatttggctggtgtgcaatgcaaaacatctcctaatgggcagattatcaagttccattcttcaatgaatgaagcagcaaaagcaatgttgcaccagatcctgaagatgaactcatcacctaggctggaaccatcgatgaacaattctggtcccttactgatcggtaatcatccttcttccaatggattagacagtgggagctcttcaactcggatgtcaggagtgatgctttcagaggttccaacagcttctgggccatcatatttgcctatggaaactgggttcccagccagccattcaactactgccatttctgaggtccaatctcctgcttctgtagcaaccgactatgttaaaacagattatactgctgagatgggcatgcataattctgggcaaaataccatcctgcccaacttcactgcaatgacaggaattgtgcccggaggctctgctggaggtcctaacatgaatattgcagggtctgagaaggggaatgcagagttttttgacaccatgtcatctgtgttggatgcgccagtgcccatagaaactgaagctctctctcccagccaggatgaggaagtctttctggatggaaaccataagcttcctggcattaatgatgtgttctgggaacaatttcttacagcaagcccgctcaatggggagacagatgaaattaattcaagctctccagaaagtagcatgagcaaggagcaggaattgcaatcatggcaggacaatggatgggacaatattcaacatatgaatcgtctagctgaacaaatggggcttcttacaccggaaagcttaaaagggtga

SEQ ID NO: 332 - protein, 496 aa, Populus balsamifera subsp. trichocarpa
  misc_feature: Ceres ANNOT ID no.1523420
  misc_feature: Bit score of 760.2 for HMM based on sequences of FIGURE 12.
  misc_feature (12)..(183): Pfam Name: HSF_DNA-bind Pfam Description: HSF-type DNA-binding
  misc_feature: Functional Homolog Of Ceres LOCUS ID no. At1g32330 at SEQ ID NO. 311
MDSGNNNTNTVPPFLSKTYDMVDDPSTDSVVSWSSSNNSFVVWNVPEFQTDLLPKYFKHSNFSSFVRQLNTYGFRKVDPDRFEFANEGFLRGQKHLLRSISRKKPVHGNLPPQVQSSSVTTCVEVGKFGLEEEVERLKRDKNVLMQELVRLRQQQQATDHQLHTVGQRVQGMEQRQQQMMSFLAKAMQNPGFLSQLVQQQNESNRRIAGASKKRRLPRQEEENLAGVQCKTSPNGQIIKFHSSMNEAAKAMLHQILKMNSSPRLEPSMNNSGPLLIGNHPSSNGLDSGSSSTRMSGVMLSEVPTASGPSYLPMETGFPASHSTTAISEVQSPASVATDYVKTDYTAEMGMHNSGQNTILPNFTAMTGIVPGGSAGGPNMNIAGSEKGNAEFFDTMSSVLDAPVPIETEALSPSQDEEVFLDGNHKLPGINDVFWEQFLTASPLNGETDEINSSSPESSMSKEQELQSWQDNGWDNIQHMNRLAEQMGLLTPESLKG

SEQ ID NO: 333 - DNA, 1734 bp, Populus balsamifera subsp. trichocarpa
  misc_feature: Ceres ANNOT ID no.1447046
  misc_feature: Encodes the peptide sequence at SEQ ID NO 334
atggatggaacaatcaactctgcaagcggtggcgactcctcgatcagcggcggtggggcacaagcggcgtcggtgccgatggcgtcacagtcgaatgcgccgccgccatttctaagtaagacttacgacatggtagacgatccggcgacagacgcggtggtgtcttggagttcgacgaataatagttttgtggtttggaatccgccggagttcgctcgcgatcttttgccgaattttcttgctttacttctagctgtatgtggaaggaactcgacaagagcttatcctttcaccttcaatattgcctcaaggaaattatgtgctccttttaaatcaaacggaaatgcagttggctttctcagaaagcaagtgggcatcgaactcccaatcatagctgaaatgtctttaccacgagctagtgttcatcttgcctcttgtggccacatcatctccctcaaacctttggcactaacaatatctgcattcctacccttgggttttcgaaaggtggatccagaccgttgggaatttgccaatgaaggatttttgaggggtcagaagcacctgcttaggattatcagtcggcgaaaacctgcccacgggcatgctaatcaacagccacaacaaccgcatggacagaactcatcagttgccgcctgtgttgaggttgggaaatttgggctcgaggaagaggtggagaggcttaagagggacaagaatgtccttatgcaagaacttgttaggttgaggcagcagcaacagtccacagatagccagttgcaaaccatggtacagcgacttcaaggaatggagcagcgtcagcaacagatgatgtcattcctggccaaggcgatgaacagcccaggcttcttggctcagtttgtacagcagcaaaatgacaacaataggcgcataacggaagccaataaaaaacgaaggctcaagcaggaggatgttcctgagaatgagggttctggttctcatgatgggcagattgtgaagtatcagcctctgatgaatgaggcagcccaagcaatgcttaggcagattatgaaaatggatgcttcttctaagttggaatcttatgacaataatcttggtgcaaaagacagtggaagctcttcgagccacacatcaggagtgactcttcaagaggttctgccaacttcagggcaatccgctcatataccagcagcttttgggatttccaggcagggcccatcggctccaatatctgaaatacaatcttccctgcaaattgctagttctgaaaaggttacagcttctcagtttccggatataagtatgccggttggagcacagggggcaacctccatacctattcctcaggcagatgtgatcatgccccatgtttctcaaatgcttgaaatggtaccagaaaatgttgctgatatcccttgtgaagattacatggaaccagagacatgcaatgatggattcatagatctagcttcattaggaattaatggaatacccatagatattgataacatttcccctgatcctgatattgatgctttgcttgataattctagcttctgggatgaccttcttgtgcagagtccagagcatgaggatattgaatcaagttctgtagagggtaaagccaatggaaatgatgtgcagccaaatgcaaacgggtgggacaaagctcagcatgtggatcagctgacagaacaaatggagcttctgacatcagacaagaagctttaa

SEQ ID NO: 334 - protein, 577 aa, Populus balsamifera subsp. trichocarpa
  misc_feature: Ceres ANNOT ID no.1447046
  misc_feature: Bit score of 1040.1 for HMM based on sequences of FIGURE 12.
  misc_feature (35)..(281): Pfam Name: HSF_DNA-bind Pfam Description: HSF-type DNA-binding
  misc_feature: Functional Homolog Of Ceres LOCUS ID no. At1g32330 at SEQ ID NO. 311
MDGTINSASGGDSSISGGGAQAASVPMASQSNAPPPFLSKTYDMVDDPATDAVVSWSSTNNSFVVWNPPEFARDLLPNFLALLLAVCGRNSTRAYPFTFNIASRKLCAPFKSNGNAVGFLRKQVGIELPIIAEMSLPRASVHLASCGHIISLKPLALTISAFLPLGFRKVDPDRWEFANEGFLRGQKHLLRIISRRKPAHGHANQQPQQPHGQNSSVAACVEVGKFGLEEEVERLKRDKNVLMQELVRLRQQQQSTDSQLQTMVQRLQGMEQRQQQMMSFLAKAMNSPGFLAQFVQQQNDNNRRITEANKKRRLKQEDVPENEGSGSHDGQIVKYQPLMNEAAQAMLRQIMKMDASSKLESYDNNLGAKDSGSSSSHTSGVTLQEVLPTSGQSAHIPAAFGISRQGPSAPISEIQSSLQIASSEKVTASQFPDISMPVGAQGATSIPIPQADVIMPHVSQMLEMVPENVADIPCEDYMEPETCNDGFIDLASLGINGIPIDIDNISPDPDIDALLDNSSFWDDLLVQSPEHEDIESSSVEGKANGNDVQPNANGWDKAQHVDQLTEQMELLTSDKKL

SEQ ID NO: 335 - protein, 432 aa, Brassica oleracea
  misc_feature: Public GI ID no.89274218
  misc_feature: Bit score of 1082.0 for HMM based on sequences of FIGURE 12.
  misc_feature (36)..(215): Pfam Name: HSF_DNA-bind Pfam Description: HSF-type DNA-binding
  misc_feature: Functional Homolog Of Ceres LOCUS ID no. At1g32330 at SEQ ID NO. 311
MDGVTGGDSKSGEATTAPPLRNPHPATLLGTNALPPPFLSKTYDMVEDPASDAIVSWSPANNSFVVWDPPEFSRSLLPRYFKHNNFSSFVRQLNTYGFRKVDPDRWEFANEGFLRGQKHLLKTISRRKSTQGHGSSSSSNPQSHQGHMASLSSCVEVGKFGLEEEVEQLKRDKNVLMQELVKLRQQQQSTDSKLQSMVKSLQTMEQRQQQIMSFLAKAVQNPTFLSQFIQKQTDSGNMHVTEASKKRRLTEDAAAASDGQIVKYQPIRSDSTMSMMWNMMNTDEKFPFSPNRDSGVTFQEVLLPTTSGQSQAYAPISSASTSLMPMIPPMPQESISDSPTENYMNAEKDVSEAFISPSPFLDGGSVPNQLEGLPQDLDIDELMSNCDIFEEYLAQSPVFGDETTLESSDANGGHVDKLIEELGHLTSETKQL

SEQ ID NO: 336 - protein, 481 aa, Arabidopsis thaliana
  misc_feature: Public GI ID no.25296101
  misc_feature: Bit score of 671.7 for HMM based on sequences of FIGURE 12.
  misc_feature (26)..(200): Pfam Name: HSF_DNA-bind Pfam Description: HSF-type DNA-binding
  misc_feature: Functional Homolog Of Ceres LOCUS ID no. At1g32330 at SEQ ID NO. 311
MESVPESVPSPNSNTPSIPPPVNSVPPFLSKTYDMVDDPLTNEVVSWSSGNNSFVVWSAPEFSKVLLPKYFKHNNFSSFVRQLNTYGFRKVDPDRWEFANEGFLRGRKQLLKSIVRRKPSHVQQNQQQTQVQSSSVGACVEVGKFGIEEEVERLKRDKNVLMQELVRLRQQQQATENQLQNVGQKVQVMEQRQQQMMSFLAKAVQSPGFLNQLVQQNNNDGNRQIPGSNKKRRLPVDEQENRGDNVANGLNRQIVRYQPSINEAAQNMLRQFLNTSTSPRYESVSNNPDSFLLGDVPSSTSVDNGNPSSRVSGVTLAEFSPNTVQSATNQVPEASLAHHPQAGLVQPNIGQSPAQGAAPADSWSPEFDLVGCETDSGECFDPIMAVLDESEGDAISPEGEGKMNELLEGVPKLPGIQDPFWEQFFSVELPAIADTDDILSGSVENNDLVLEQEPNEWTRNEQQMKYLTEQMGLLSSEAQRK

SEQ ID NO: 337 - protein, 468 aa, Arabidopsis thaliana
  misc_feature: Public GI ID no.15228440
  misc_feature: Bit score of 596.6 for HMM based on sequences of FIGURE 12.
  misc_feature (22)..(195): Pfam Name: HSF_DNA-bind Pfam Description: HSF-type DNA-binding
  misc_feature: Functional Homolog Of Ceres LOCUS ID no. At1g32330 at SEQ ID NO. 311
MGTVCESVATAKSSTAVMSSIPPFLSKTYDMVDDPLTDDVVSWSSGNNSFVVWNVPEFAKQFLPKYFKHNNFSSFVRQLNTYGFRKVDPDRWEFANEGFLRGQKQILKSIVRRKPAQVQPPQQPQVQHSSVGACVEVGKFGLEEEVERLQRDKNVLMQELVRLRQQQQVTEHHLQNVGQKVHVMEQRQQQMMSFLAKAVQSPGFLNQFSQQSNEANQHISESNKKRRLPVEDQMNSGSHGVNGLSRQIVRYQSSMNDATNTMLQQIQQMSNAPSHESLSSNNGSFLLGDVPNSNISDNGSSSNGSPEVTLADVSSIPAGFYPAMKYHEPCETNQVMETNLPFSQGDLLPPTQGAAASGSSSSDLVGCETDNGECLDPIMAVLDGALELEADTLNELLPEVQDSFWEQFIGESPVIGETDELISGSVENELILEQLELQSTLSNVWSKNQQMNHLTEQMGLLTSDALRK

SEQ ID NO: 338 - protein, 468 aa, Arabidopsis thaliana
  misc_feature: Public GI ID no.6624612
  misc_feature: Bit score of 589.3 for HMM based on sequences of FIGURE 12.
  misc_feature (22)..(195): Pfam Name: HSF_DNA-bind Pfam Description: HSF-type DNA-binding
  misc_feature: Functional Homolog Of Ceres LOCUS ID no. At1g32330 at SEQ ID NO. 311
MGTVCESVATAKSSTAVMSSIPPFLSKTYDMVDDPLTDDVVSWSSGNNSFVVWNVPEFAKQFLPKYFNHNNFSSFVRQLNTYGFRKVDPDRWEFANEGFLRGQKQILKSIVRRKPAQVQPPQQPQVQHSSVGACVEVGKFGLEEEVERLQRDKNVLMQELVRLRQQQQVTEHHLQNVGQKVHVMEQRQQQMMSFLAKAVQSPGFLNQFSQQSNEANQHISESNKKRRLPVEDQMNSGSHGVNGLSRQIVRYQSSMNDATNTMLQQIQQMSNAPSHESLSSNNGSFLLGDVPNSNISDNGSSSNGSPEVTLADVSSIPAGFYPAMKYHEPCETNQVMETNLPFSQGDLLPPTQGAAASGSSSSDLVGCETDNGECLDPIMAVLDGALELEADTLNELLPEVQDSFWEQFIGESPVIGETDELISGSVENELILEQLELQSTLSNVWSKNQQMNHLTEQMGLLTSDALRK

SEQ ID NO: 339 - protein, 489 aa, Oryza sativa subsp. japonica
  misc_feature: Public GI ID no.125588688
  misc_feature: Bit score of 1107.2 for HMM based on sequences of FIGURE 12.
  misc_feature (36)..(193): Pfam Name: HSF_DNA-bind Pfam Description: HSF-type DNA-binding
  misc_feature: Functional Homolog Of Ceres LOCUS ID no. At1g32330 at SEQ ID NO. 311
MEAAVAAAAAAAGAVTTAVAPPPGAAVSNGVATAPPPFLMKTYEMVDDPATDAVVSWGPGNQKLRCVKQPRVRARPPPQGFRKVDPDRWEFANEGFLRGQKHLLKTINRRKPTHGNNQVQQPQLPAAPVPACVEVGKFGMEEEIEMLKRDKNVLMQELVRLRQQQQTTDHQLQTLGKRLQGMEQRQQQMMSFLAKAMHSPGFLAQFVQQNENSRRRIVASNKKRRLPKQDGSLDSESASLDGQIVKYQPMINEAAKAMLRKILKLDSSHRFESMGNSDNFLLENYMPNGQGLDSSSSTRNSGVTLAEVPANSGLPYVATSSGLSAICSTSTPQIQCPVVLDNGIPKEVPNMSAVPSVPKAVAPGPTDINILEFPDLQDIVAEENVDIPGGGFEMPGPEGVFSLPEEGDDSVPIETDEILYNDDTQKLPAIIDSFWEQFLVASPLSVDNDEVDSGVLDQKETQQGNGWTKAENMANLTEQMGLLSSHHTG

SEQ ID NO: 340 - protein, 372 aa, Oryza sativa subsp. japonica
  misc_feature: Public GI ID no.115470859
  misc_feature: Bit score of 203.9 for HMM based on sequences of FIGURE 12.
  misc_feature (51)..(219): Pfam Name: HSF_DNA-bind Pfam Description: HSF-type DNA-binding
  misc_feature: Functional Homolog Of Ceres LOCUS ID no. At1g32330 at SEQ ID NO. 311
MDDPMLNAVKEEESHGDGGGLEVVAGEDGAAAVAAGVAPRPMEGLHDAGPPPFLTKTYDMVDDAGTDAAVSWSATSNSFVVWDPHAFATVLLPRFFKHNNFSSFVRQLNTYGFRKVDPDRWEFANENFLRGQRHLLKNIKRRKPPSHTASNQQSLGPYLEVGHFGYDAEIDRLKRDKQLLMAEVVKLRQEQQNTKANLKAMEDRLQGTEQRQQQMMAFLARVMKNPEFLKQLMSQNEMRKELQDAISKKRRRRIDQGPEVDDVGTSSSIEQESPALFDPQESVEFLIDGIPSDLENSAMDAGGLVEPQDFDVGASEQQQIGPQGELNDNFWEELLNEGLVGEENDNPVVEDDMNVLSEKMGYLNSNGPTAGE

SEQ ID NO: 341 - protein, 406 aa, Arabidopsis thaliana
  misc_feature: Public GI ID no.15228865
  misc_feature: Bit score of 178.3 for HMM based on sequences of FIGURE 12.
  misc_feature (60)..(236): Pfam Name: HSF_DNA-bind Pfam Description: HSF-type DNA-binding
  misc_feature: Functional Homolog Of Ceres LOCUS ID no. At1g32330 at SEQ ID NO. 311
MDPSFRFIKEEFPAGFSDSPSPPSSSSYLYSSSMAEAAINDPTTLSYPQPLEGLHESGPPPFLTKTYDLVEDSRTNHVVSWSKSNNSFIVWDPQAFSVTLLPRFFKHNNFSSFVRQLNTYGFRKVNPDRWEFANEGFLRGQKHLLKNIRRRKTSNNSNQMQQPQSSEQQSLDNFCIEVGRYGLDGEMDSLRRDKQVLMMELVRLRQQQQSTKMYLTLIEEKLKKTESKQKQMMSFLARAMQNPDFIQQLVEQKEKRKEIEEAISKKRQRPIDQGKRNVEDYGDESGYGNDVAASSSALIGMSQEYTYGNMSEFEMSELDKLAMHIQGLGDNSSAREEVLNVEKGNDEEEVEDQQQGYHKENNEIYGEGFWEDLLNEGQNFDFEGDQENVDVLIQQLGYLGSSSHTN

SEQ ID NO: 342 - DNA, 1960 bp, Zea mays
  misc_feature: Ceres CLONE ID no.1571069
  misc_feature: Encodes the peptide sequence at SEQ ID NO 343
acccgcgctcgtgacggctcacccacccccgccgtggttccgggcaacagggaagaagatcccgccctggtgccaccacgaggcacccggcggctttgatttcctctccgcccctggcgtctggcgtggtgctctggcccccagtttgtcggctgctttctacctgtacttgcagagctgtaggtgggggtaaacatggtgaggtggtcttgccaggatgacaccttatcatgttccctatccccgtgctagatgcgcgccggccgccgtgtgtgtgtatgccttaacgtcgatgcgtgccttgtactcctgtgtggccgtgtgctaggggcagctgctcgttgctgctcttttacaacggagttttactgacattgtccaacagactattccattccggtgtcagagcagagattttagcatcgttactcggattaggagggtaggatccggctatggactcaacgctgaaccaggtgaaggaggagagccatggggagggaggagatttgatggcaggcacggtggaggccgcggatgggccgtccgcggccgtcgccgcggcaccaaagccgatggagggtctgcatgaccctgggccgccgccgttcctcaccaagacatatgacatggtcgacgactcggacaccgacctgattgtgtcttggagcgccaccaacaacagcttcgtggtgtgggatccgcacgccttcgccacggtgctgctgcccaggcacttcaagcacaacaacttctccagcttcgtccggcagctcaacacctatggtttcaggaaggtggatcctgatcggtgggaattcgcgaatgagggctttttacggggacagagacacctcctgaagaacatcaggcgtcgaaaacctcctgctcagaatgccacaaaccagcagtccattgggccttaccttgaggtgggacattttggatatgatgcagagattgacatgttgaagagagacaagcagttactgatggcagaagtggtgaagctaaggcaggagcagcagaacacaaaggcaaatctcaaagcgatggaggataggctacaagggactgaacagaagcagcagcagatgatggcgttcttggcacgtgtcatgcggaatcctgaattcttgaagcacctggtttcccagaatgagatgaggaaggagcttcaagatgctatttcaaagaaaagaagacggcgcatcgaccaagggcctgaagctgatgacttgggggctagtagcagcttggagcaaggttcaccggtcctgtttaatgcccaggacccagttgaattccttgtcgacggaatcccagctgacctcgagagcccagctttcgatggccacggcctgattgggccacatgatattgatattgatattgatattggcagtacctctgagcagcagcaagacatgccccaggaggatctgaatgacaacttctgggagcagttgctgaacgaaggacttggcgaggagaacgatagccctgtaatcgaggatgatatgaatgtgctgtctgagaagatgggttatctcaactcagatggcccaacatctagcaattagtcttggcttcgttgctgttttgttatttccatcttaccagaacccgcagctcctgaattgtgttcactgtgtcagcaagactaggcaattctgcttccgttgctcggtttccatgcccttctgaattcctcgccaatggtagggcttgcttccatgagaattggctggcattcgccatggtgtcaagggagaactgctaggtgcatctgatgtgatctgactagtgattgctgcttgccactggagtggctgttttaggcgacgccagcgatctgttggttgttttacgaccctgcccgtcaggaattcagtctgtagttatgtacagtgacagcgactcagcaagtagtactgatggttaaaaaaaaaaaaaaaaa

SEQ ID NO: 343 - protein, 375 aa, Zea mays
  misc_feature: Ceres CLONE ID no.1571069
  misc_feature: Bit score of 222.4 for HMM based on sequences of FIGURE 12.
  misc_feature (50)..(218): Pfam Name: HSF_DNA-bind Pfam Description: HSF-type DNA-binding
  misc_feature: Functional Homolog Of Ceres LOCUS ID no. At1g32330 at SEQ ID NO. 311
MDSTLNQVKEESHGEGGDLMAGTVEAADGPSAAVAAAPKPMEGLHDPGPPPFLTKTYDMVDDSDTDLIVSWSATNNSFVVWDPHAFATVLLPRHFKHNNFSSFVRQLNTYGFRKVDPDRWEFANEGFLRGQRHLLKNIRRRKPPAQNATNQQSIGPYLEVGHFGYDAEIDMLKRDKQLLMAEVVKLRQEQQNTKANLKAMEDRLQGTEQKQQQMMAFLARVMRNPEFLKHLVSQNEMRKELQDAISKKRRRRIDQGPEADDLGASSSLEQGSPVLFNAQDPVEFLVDGIPADLESPAFDGHGLIGPHDIDIDIDIGSTSEQQQDMPQEDLNDNFWEQLLNEGLGEENDSPVIEDDMNVLSEKMGYLNSDGPTSSN

SEQ ID NO: 344 - protein, 357 aa, Oryza sativa subsp. japonica
  misc_feature: Public GI ID no.115455903
  misc_feature: Bit score of 216.8 for HMM based on sequences of FIGURE 12.
  misc_feature (37)..(204): Pfam Name: HSF_DNA-bind Pfam Description: HSF-type DNA-binding
  misc_feature: Functional Homolog Of Ceres LOCUS ID no. At1g32330 at SEQ ID NO. 311
MNYRVVNPVKVESGPSTGVANGQPPRPMDGLADGGPPPFLTKTYDMVDDPTTDAVVSWSATNNSFVVWDPHLFGNVLLPRYFKHNNFSSFVRQLNTYGFRKVDPDKWEFANEGFLRGQKHLLKSIKRRKPPNSSPSQQSLGSFLEVGHFGYEGEIDQLKRDKHLLMAEVVKLRQEQQNTKSDLQAMEQKLQGTEQKQQHMMAFLSRVMHNPEFIRQLFSQSEMRKELEEFVSKKRRRRIDQGPELDSMGTGSSPEQVSQVMFEPHDPVDSLFNGVPSDLESSSVEANGGKAQQDVASSSSEHGKIKPSNGELNEDFWEDLLHEGGLDEDTRNPAIDDMNLLSQKMGYLNSSSTKSPQ

SEQ ID NO: 345 - DNA, 1047 bp, Populus balsamifera subsp. trichocarpa
  misc_feature: Ceres ANNOT ID no.1459422
  misc_feature: Encodes the peptide sequence at SEQ ID NO 346
atggcatctacagctattccacaaccaatggagggactccgtgactcggttcctccaccatttctcaccaaaacttatgatataatagaagatgcaagcacaaaccatattgtttcttggagtagaggtaacaacagctttattatttgggatccccaagccttttccacgagtctcctccctagatacttcaagcacaacaatttctctagctttgttaggcagcttaacacatatgggtttagaaaggttgatccagatagatgggagtttgctaatgaagggtttctcagagggaaaaaacatcttctcaagagtattaggaggagaaaagctcctcaaacactaacttctcaggcttgtgttgaagttggaacatttggactggatggggaagtgaatcgattaaggcgagacaagcaagtactaatggtggaactggtgaagcttagacaacaacaacagactactaaagcttgcattcaacttattgaacgaaaacttaaaaggactgagaataaacagcaacagatgatgagtttcttggctagagcaatgcaaaatcccaactttgtgcagcaactagcccaacaaaaggaaatgaggaaagaacttgaagaggcgattagtaaaaagagaaggcgaccgattgatcaagggcgtagtaattttgaggttgcagaattcggccatggcgagggagtaggaacatttgttaagattgaacatcaggagtttggtgatctttctgagtttgacgatctttctgagtttgacgttccagaatttcacaatccggcaatgaacatgcaaggactaagtgaaaaccaactgatcaacttggtggaagaacgtattgagaaaggagaagaacatggaaataaaggtaacgaaattgatgagggtttctgggaagatttattgaacgaggatattattgacgaagaaatagcagtattgggtagcgaaggtgaagacgaggaagatgtaagcgtgttggttgaacagcttggttacttgggttccagtacagagttgaggacttga

SEQ ID NO: 346 - protein, 348 aa, Populus balsamifera subsp. trichocarpa
  misc_feature: Ceres ANNOT ID no.1459422
  misc_feature: Bit score of 199.1 for HMM based on sequences of FIGURE 12.
  misc_feature (19)..(182): Pfam Name: HSF_DNA-bind Pfam Description: HSF-type DNA-binding
  misc_feature: Functional Homolog Of Ceres LOCUS ID no. At1g32330 at SEQ ID NO. 311
MASTAIPQPMEGLRDSVPPPFLTKTYDIIEDASTNHIVSWSRGNNSFIIWDPQAFSTSLLPRYFKHNNFSSFVRQLNTYGFRKVDPDRWEFANEGFLRGKKHLLKSIRRRKAPQTLTSQACVEVGTFGLDGEVNRLRRDKQVLMVELVKLRQQQQTTKACIQLIERKLKRTENKQQQMMSFLARAMQNPNFVQQLAQQKEMRKELEEAISKKRRRPIDQGRSNFEVAEFGHGEGVGTFVKIEHQEFGDLSEFDDLSEFDVPEFHNPAMNMQGLSENQLINLVEERIEKGEEHGNKGNEIDEGFWEDLLNEDIIDEEIAVLGSEGEDEEDVSVLVEQLGYLGSSTELRT

SEQ ID NO: 347 - DNA, 2345 bp, Zea mays
  misc_feature: Ceres CLONE ID no.1577511
  misc_feature: Encodes the peptide sequence at SEQ ID NO 348
agaggaatccattcccaatttgcgttcccactcccaccaccgcttcttcccgtatcccttgtcctccctaatttcctctcacaaaaagcgggtgcggcgtcctgccactcacctcggtctcggggggcgccgtgcggcgggcgcccgtgctgctggtttcgctccaggggagaaggggcagagggagtagagcaggttaggtccgtttgcgttttcttttgcgggtttgtaggtcaaaagctcggcgagcactttccgctccacctcctcacgctcggaatcaaatcgatgccccccctgatttggttcctggtatcggtgcatgagcttgctccaagagatctcccttttggttcggcgtcaggggttctgtgaggtcacgcggcttcttcctcttggcgctcctcacatgtccgggcgcttcgatctctgcccactgcgcgagtgattctgctgctgcagcagctgttaggtgcgcgcggtccgttatggggtgaaccgaagcgttcctcgcagggctgtgggtttattacgccgcctgtttgcttccccgctccatgtccttgtgcccatgcttctttgcttttgtcacgcctgaaccgtgtcttcttgtagtatctgaggcttggcagttggcaagtacaaactagcaacttgcttaggtataaagtataaaccagtgtctggtgcagagcccaaaggggtcacgaatcgttgatgcatagatctgcttctggctgagataaggctctaagttcgctctgttgatggggctaccatgagccacgggaacgggatgttgaattctgtcaaggtggagaggtggccagcagcagtcgctgcaaatggccagcctaggccgatggatgtgctccacgacggcagctcgccgccgttccttaccaagacgtatgacatggttgatgacccaaccacgaacgccgttgtgtcatggagtgccgccaacaatagctttgtagtttgggatcctcatatctttgggacggtgctgctgccaaggtacttcaagcacaacaacttctccagctttgttcggcagctcaatacttatggcttcagaaaggtggatcctgacagatgggaatttgctaatgaggagtttctgagaggtcagaggcacctcctcaaaaacattaggcgtcggaaacctccacactcatctccaaatcaacaatctcttggctcttacctcgaggtaggacactttggatatgaagaagagattgatcagctgaagagggataaacagctcttgatggctgaggtagtgaagctgaggcaggagcaccaaaatactagatcagatctacaggccatggaagagaaattacaagataccgagcagaagcagcagcagatgatggcattcatggcacgcgtcatgcagaaccctgatttcatgcgtcagctgatctcccagcgggagatgaggaaggagctcgaggatgccatctcgaagaagagaaggcgccgcattgaccagggacatgaagctggtagcatgggcactggttctagcctggagcaagggccacagggagtgtttgaaccgcaggagccggtggaatcactcgccaacggtgtgccatctgatctggagagttcgtctgttgaggcgaagggattggaggttcgacagggtgtttcttcaggtggttctgagcatctgaatggcaggccaagcggagagttaaatgatgatttctgggaggaccttctgcacgaggggggacttggtgcagatgcaggcaatgctgttggtcaggatgatatgaacatggacatggacccagatgttagcctgcctcaactgaaacaacatggacccagacattagccgctcttgtgctatcacaatggctgtgactctgtgagtatctttacagttatgctcgttatacccctgtggtgtacctgtttcgatcgtcttcgaccaaatgtcacgtcgactgcagtctccagttgttaatacagtctgttcagcacgctgatttaagtatttgggtcaagatgttcatataatcctgtggtatccagagatattatagtttgttttcgtaactgtttgcgcagagaccatgctatgttgcctgcaggctatcagtgtatttgttctaacagatcgcaacgctggtacaacgcagtgacctgccagactgggccactatgagattgtagggaaagaccagatagcttgtgtatgtaaaagctgatccatagtagcctatcatgtgcaacgctattgccctttgggatttggcatttcactgtatataacatatcatcgccgtattgccgcatccaaataaaaaaaaaaaaaaaaa

SEQ ID NO: 348 - protein, 359 aa, Zea mays
  misc_feature: Ceres CLONE ID no.1577511
  misc_feature: Bit score of 152.1 for HMM based on sequences of FIGURE 12.
  misc_feature (38)..(205): Pfam Name: HSF_DNA-bind Pfam Description: HSF-type DNA-binding
  misc_feature: Functional Homolog Of Ceres LOCUS ID no. At1g32330 at SEQ ID NO. 311
MSHGNGMLNSVKVERWPAAVAANGQPRPMDVLHDGSSPPFLTKTYDMVDDPTTNAVVSWSAANNSFVVWDPHIFGTVLLPRYFKHNNFSSFVRQLNTYGFRKVDPDRWEFANEEFLRGQRHLLKNIRRRKPPHSSPNQQSLGSYLEVGHFGYEEEIDQLKRDKQLLMAEVVKLRQEHQNTRSDLQAMEEKLQDTEQKQQQMMAFMARVMQNPDFMRQLISQREMRKELEDAISKKRRRRIDQGHEAGSMGTGSSLEQGPQGVFEPQEPVESLANGVPSDLESSSVEAKGLEVRQGVSSGGSEHLNGRPSGELNDDFWEDLLHEGGLGADAGNAVGQDDMNMDMDPDVSLPQLKQHGPRH

SEQ ID NO: 349 - protein, 410 aa, Oryza sativa subsp. japonica
  misc_feature: Public GI ID no.115451657
  misc_feature: Bit score of 130.4 for HMM based on sequences of FIGURE 12.
  misc_feature (49)..(225): Pfam Name: HSF_DNA-bind Pfam Description: HSF-type DNA-binding
  misc_feature: Functional Homolog Of Ceres LOCUS ID no. At1g32330 at SEQ ID NO. 311
MGSKKRSPQHPAAAAPPPAVGGGGGGEVSGDGGASTANGPVVPKPSEVAPFLTKVYDMVSDPATDNVISWAEGGGSFVIWDSHAFERDLHRHFKHSNFTSFIRQLNTYGFRKVHPDRWEWANEGFIMGQKHLLKTIKRRKKSSQESPSEIQKAPVKTAPGTENIEIGKYGGLEKEVETLKRDKALLMQQLVDLRHYQQTSNLEVQNLIERLQVMEQNQQQMMALLAIVVQNPSFLNQLVQQQQQQRRSNWWSPDGSKKRRFHALEQGPVTDQETSGRGAHIVEYLPPVPETSGQVNPVEGAICSANSQPVPSPAVATPMDMQTSNVADTLGSSEEPFADNSTLHEWDDNDMQLLFDDNLDPILPPFENDGQMGPPLSVQDYDFPQLEQDCLMEAQYNSNNPQYADVITEA

SEQ ID NO: 350 - protein, 345 aa, Arabidopsis thaliana
  misc_feature: Public GI ID no.15225255
  misc_feature: Bit score of 152.5 for HMM based on sequences of FIGURE 12.
  misc_feature (43)..(212): Pfam Name: HSF_DNA-bind Pfam Description: HSF-type DNA-binding
  misc_feature: Functional Homolog Of Ceres LOCUS ID no. At1g32330 at SEQ ID NO. 311
MEELKVEMEEETVTFTGSVAASSSVGSSSSPRPMEGLNETGPPPFLTKTYEMVEDPATDTVVSWSNGRNSFVVWDSHKFSTTLLPRYFKHSNFSSFIRQLNTYGFRKIDPDRWEFANEGFLAGQKHLLKNIKRRRNMGLQNVNQQGSGMSCVEVGQYGFDGEVERLKRDHGVLVAEVVRLRQQQHSSKSQVAAMEQRLLVTEKRQQQMMTFLAKALNNPNFVQQFAVMSKEKKSLFGLDVGRKRRLTSTPSLGTMEENLLHDQEFDRMKDDMEMLFAAAIDDEANNSMPTKEEQCLEAMNVMMRDGNLEAALDVKVEDLVGSPLDWDSQDLHDMVDQMGFLGSEP

SEQ ID NO: 351 - protein, 370 aa, Oryza sativa subsp. indica
  misc_feature: Public GI ID no.125545695
  misc_feature: Bit score of 117.3 for HMM based on sequences of FIGURE 12.
  misc_feature (48)..(227): Pfam Name: HSF_DNA-bind Pfam Description: HSF-type DNA-binding
  misc_feature: Functional Homolog Of Ceres LOCUS ID no. At1g32330 at SEQ ID NO. 311
MNPLRVIVKEEELDFAAAAAGEGSPSSWAVGVMDLPRPMEGLGEAGPPPFLCKTYEVVDDPGTDTVISWGFAGNSFVVWDANAFAAVLLPRYFKHSNFSSFVRQLNTYGFRKVDPDRWEFANEGFLRGKKELLKTIKRRRPPPSSPPSSSSSSSSSQHQQQPAAACLEVGQFGRDGVVNRLQRDKSVLIAEVVKLRQEQQTTRAQMQAMEERISAAEQKQQQMTVFLARAMKNPGFLQMLVDRQAGQHGARNRVLEDALSKKRRRPIEYLLTRNGETCAAGESAAMLAADGVAEPDGDTTPRGDGGGGGDTESFWMQLLSLGLEEKQREDGVAGGVQESNSGGADVDNDEEDDDDDVDVLVQSIYHLSPK

SEQ ID NO: 352 - DNA, 1332 bp, Populus balsamifera subsp. trichocarpa
  misc_feature: Ceres ANNOT ID no.1471817
  misc_feature: Encodes the peptide sequence at SEQ ID NO 353
atggatggttcacagagtaacagttcaaatgcaccaccgccttttctaaccaaaacatatgacatggtggatgatcccttgactaactcggtggtgtcatggagccacagtggttgcagttttgtggtgtggaatccacctgaatttgctcaggatttgcttcccaagtacttcaagcacaataacttctccagttttgtcaggcagcttaatacttatggatttaggaagattgatcctgatcagtgggagtttggtaacgaagaatttataagagggcagagacatattctaaagaatattcaccggcggaagccagttcatagccattccatgcagaatcatgggattatctctccgcttgctgaaacagaaaaacaggaatatgagaaggaaattaaccgactgaaacatgataagaacgaacttgagttggagctacagagaaacgaggcagagaagcagggatttgaatttcaaatcgtctcactgggtgagcgcttacagagtatggaatgcagacagaagcagttgatgtccttcctgggtcagctaatgcgaaaaccagagtttgcctctcttctcatgcagcagtctgaatatcataacaaaaagagaaagctactgaaacttgattacttccagggcgattacaaagaggagaatgagaatttgtgttctccaattgcaaacctggatggattgcctgctccaatgctgcatccggagtcggttgagaagttggattcatcattaaaattcttggaagattttctctatgctgttggtgaaagttttagtgaagaagtgtgccatgttggtgtcagatcacaaccttcaatggtcatagttagagaattaagttcatcctctgcagatggcgagccttggtctccaagatcatttccatcttcaccacattcgagggatattcgttcatcacctgagctggctagatgtatcaataatgttgtcagacaaacaactccaagttatctcggtgatgatacgatgcctgaatcttcacagttacaggcaaattgcaagcattctagagctccagcatctgaagtcataaaagcaccagcattagagatgaaaagtcctactgtggtgaatggagcaaatgatcttttctggcaacacttcctgactgaggcccccggtccgcatgatggacaagaatctgaaggtcgaacagaaagaaggattacagatgacataagaagcaataccaagccggacagtcacgagagatcttggtggaatacgaactacatagataatcttgcaaaaaatatgggacacattgcgacagctgaaagatcatga

SEQ ID NO: 353 - protein, 443 aa, Populus balsamifera subsp. trichocarpa
  misc_feature: Ceres ANNOT ID no.1471817
  misc_feature: Bit score of 129.4 for HMM based on sequences of FIGURE 12.
  misc_feature (13)..(182): Pfam Name: HSF_DNA-bind Pfam Description: HSF-type DNA-binding
  misc_feature: Functional Homolog Of Ceres LOCUS ID no. At1g32330 at SEQ ID NO. 311
MDGSQSNSSNAPPPFLTKTYDMVDDPLTNSVVSWSHSGCSFVVWNPPEFAQDLLPKYFKHNNFSSFVRQLNTYGFRKIDPDQWEFGNEEFIRGQRHILKNIHRRKPVHSHSMQNHGIISPLAETEKQEYEKEINRLKHDKNELELELQRNEAEKQGFEFQIVSLGERLQSMECRQKQLMSFLGQLMRKPEFASLLMQQSEYHNKKRKLLKLDYFQGDYKEENENLCSPIANLDGLPAPMLHPESVEKLDSSLKFLEDFLYAVGESFSEEVCHVGVRSQPSMVIVRELSSSSADGEPWSPRSFPSSPHSRDIRSSPELARCINNVVRQTTPSYLGDDTMPESSQLQANCKHSRAPASEVIKAPALEMKSPTVVNGANDLFWQHFLTEAPGPHDGQESEGRTERRITDDIRSNTKPDSHERSWWNTNYIDNLAKNMGHIATAERS

SEQ ID NO: 354 - DNA, 1473 bp, Populus balsamifera subsp. trichocarpa
  misc_feature: Ceres ANNOT ID no.1440896
  misc_feature: Encodes the peptide sequence at SEQ ID NO 355
atggaagcaggaccatcgtcagcgacctcaggaggtggtggtggtggtggaggaggaccggcgccgttcttggtaaagacatatgacatggtggatgattcatcgaccgacgagatcgtgtcttggagttcgaataaaaacagctttgttgtttggaaccctccagaattcgccagattgttgctccctacctttttcaagcacaataatttctctagctttatcagacaattaaatacctatggatttagaaagattgatcctgagagatgggaatttgccaatgaagattttgtgaaagatcaaaagcacctgcttaagaatatctaccgaagaaaaccaatccacagtcatagtcaacctcaaggttctttagtggatccagaaagagcagcatatgaggaagaaatagaaaagcttgcacgtgataaagctaaactcaaggcaagtattctagggtttgaacagcagcggtcatctgcaaagctacaggtggaagatctaacacagaagatagatactatgcagcagaggcaggaaaagctgctgtcgttcttagagaaggctgttcaaaaccctacttttgttgaacaccttgctcgtaagattgaagctatggatttttcagcctatagcaagaagagacgattgccccaagttgatcacccaatgccaattgcagaaaatagtcttgtggaaaatcacagtagttctagacctgagtcgaatgtcatccatcaagatttcccagataagttgagactggaattgtcaccagctgtttcagatattaatttggtttcacacagcacacagagctccaatgaagatgggggaagcccacaaagaaaaatatctgaagggaatccaaaagatgcactgactaggacatcaggtttactactggcacctgaaacattggaactttcagacacaggggcatcgtatgcatttaaagtgaatccagctgtcccaagagacataccagcaaatgggagcccagcactacattcactgcagtcgaatttgacttctaatgaagaagttgatggtcacatttcctgtcagctaaatcttagtctggcatcttctcctttgcaagtcaacaaaaatccttatttaactaggatacctcaactaggccaggaaattggcaaatctccagaatcaaggtttaatgagagtaacaaagattctgatatccgagttagtcagaacaacatgaatctgggtaacgaggtcagagctttatccaattcccaggaaaccccaaataacaatcaagcacctgcatcagctccggttagagtgaatgatgttttctgggaacagttcctaactgaaaggcccggctattctgataatgaagaggcaagttctaattacagagcaaacccatatgatgagagagaaagaaggataggtttcggagtgccaagaaatgctaaaaacatggagcagctctctctgtga

SEQ ID NO: 355 - protein, 490 aa, Populus balsamifera subsp. trichocarpa
  misc_feature: Ceres ANNOT ID no.1440896
  misc_feature: Bit score of 90.9 for HMM based on sequences of FIGURE 12.
  misc_feature (20)..(186): Pfam Name: HSF_DNA-bind Pfam Description: HSF-type DNA-binding
  misc_feature: Functional Homolog Of Ceres LOCUS ID no. At1g32330 at SEQ ID NO. 311
MEAGPSSATSGGGGGGGGGPAPFLVKTYDMVDDSSTDEIVSWSSNKNSFVVWNPPEFARLLLPTFFKHNNFSSFIRQLNTYGFRKIDPERWEFANEDFVKDQKHLLKNIYRRKPIHSHSQPQGSLVDPERAAYEEEIEKLARDKAKLKASILGFEQQRSSAKLQVEDLTQKIDTMQQRQEKLLSFLEKAVQNPTFVEHLARKIEAMDFSAYSKKRRLPQVDHPMPIAENSLVENHSSSRPESNVIHQDFPDKLRLELSPAVSDINLVSHSTQSSNEDGGSPQRKISEGNPKDALTRTSGLLLAPETLELSDTGASYAFKVNPAVPRDIPANGSPALHSLQSNLTSNEEVDGHISCQLNLSLASSPLQVNKNPYLTRIPQLGQEIGKSPESRFNESNKDSDIRVSQNNMNLGNEVRALSNSQETPNNNQAPASAPVRVNDVFWEQFLTERPGYSDNEEASSNYRANPYDERERRIGFGVPRNAKNMEQLSL

SEQ ID NO: 356 - protein, 801 aa, Chlamydomonas reinhardtii
  misc_feature: Public GI ID no.119393868
  misc_feature: Bit score of 76.8 for HMM based on sequences of FIGURE 12.
  misc_feature (9)..(207): Pfam Name: HSF_DNA-bind Pfam Description: HSF-type DNA-binding
  misc_feature: Functional Homolog Of Ceres LOCUS ID no. At1g32330 at SEQ ID NO. 311
MTNPANQPPPFLIKTYDLVDDPSTDNIVSWGADGHSFIVWKPPEFARDLLPKHFKHNNFSSFVRQLNTYGFRKVDPDRWEFANEHFVRGKKEQLRDIHRRKPSATHNATGTGGGASGAAAGAAAATPGAPVPSNALVAAGQTAPAIEIGAYGGFREEIDNLKRDKNVLMVELVRLRQQQATADAKIRDLTGRLENTEAKQQTMINMFAAAFKNPAMFQRMLSTMASSGVQRLTAAPAYSGGAGAAGGRRKRRARGETSVTDIGEDIAGTGVGITEAIDADMLETGGANHMAVNGVHGAAGSPPSHGHGADDTSSNGSATDATGAANGYGHQLVAYNPAVAAAAAAAGAAGGSSAAAVSGGAASTDALSEMMMRSFQSLLSGAEDMTGDVTGALNSLAIGQGGGVGGGGAHVGHALGAHMVPSAAAPHVTIQEQPSTSAAAAAAAAAGGGTPTTSSVVLMGSSAPGVVVNSTGGAVVDPTSGAAGLISTAIQPYQGPAALPGLPQGVAVGGVTGLSGLGPGTTLLAPGAMATAPHAPGAHPTPSAFVITKPEPMLGGAPGPVLPVGTPGMVPVQPSTGPGSSAAMTASALPTSAFAALAGVPAVPMPVPAVPMAGAAGPSVPIPMPGSAAATPVPMVPVVMSPPPPGHTMIPIQTATMAPPTQAMGAAGLRVPSGLPAINNMALTPAAAAAAAAAAAAAAMPGSGGLFDATPTSAAGLPVNDNPTVTSPPADADGVDGMLGGLSGLDLMTSLPSGELVLPSDGDFGDDVWAQIMSAASAQAPDAAGGLGGLDLNPVSAALEH

SEQ ID NO: 357 - DNA, 1179 bp, Populus balsamifera subsp. trichocarpa
  misc_feature: Ceres ANNOT ID no.1517025
  misc_feature: Encodes the peptide sequence at SEQ ID NO 358
atggtgaaatcaagcgaaagtggggtggctcctttcttgaagaaatgctatgaaatggttgatgatgaatcaacaaattcgataatctcatggagccagaccaatgacagctttgttatatgggacatgactgaattctctgtccacttattgcctaagtacttcaagcacagcaattcttctagttttgtcaggcagctcaatatctatggatttagaaaaattgatacagatcagtgggaatttgcaaatgacggatttatcagagggcagaaacatttgttaaagaatatctgcaggaggaaaaattctcagggcacagacaatcgaaagtcagtgcagcagcaagacaactccattgagcattgtgaaaatgttgaaaatgtgggtctctggaaggaagttgagagcctgaagacaggtagaaatgcagttacacaggagttggttaagctcaggcagcaccaggaaactgcagacaataagttgctcctgttgagggatcgccttcaaggaatggaaaaaaatcagcagcagatgctgtcttttttagtgatggcaatgcaaagcccagggtttctagctcagctactaaacaaaaaggaaaataattggcggatagctgagccaggaagcatagtggagcagggtgcagatgatgctgagcagttggcttctgagggaatgatagtaaggtaccagccaccagtggatgagatgttcgagcctgtacatgcaccgccaattggtccagaaaatccacgagaatctaacccatcttccgatgggatgaaagatttttttgtgagtccagattttatggaacttcttatggatgaaaatttgggttttgaaaatcatacctcgtttggtttaccagaattagcggatgatggttcttgggaacaactgcttttagccaatcctttcattgagaatattaaagacaccaaacccggttctgaagagagcactgatactgaaactgataccggaacaacaattgttggaacgcagctggagagatcccaaagttttgaatatttaatagaaatgatggagaagtccaatgacttggagaacaaagcaactgatgaaggacctcactttgagaagtctcagaaattggaaattctaactgagcagatgggtcttttggcttcggagccaaaccactaa

SEQ ID NO: 358 - protein, 392 aa, Populus balsamifera subsp. trichocarpa
  misc_feature: Ceres ANNOT ID no.1517025
  misc_feature: Bit score of 127.7 for HMM based on sequences of FIGURE 12.
  misc_feature (10)..(184): Pfam Name: HSF_DNA-bind Pfam Description: HSF-type DNA-binding
  misc_feature: Functional Homolog Of Ceres LOCUS ID no. At1g32330 at SEQ ID NO. 311
MVKSSESGVAPFLKKCYEMVDDESTNSIISWSQTNDSFVIWDMTEFSVHLLPKYFKHSNSSSFVRQLNIYGFRKIDTDQWEFANDGFIRGQKHLLKNICRRKNSQGTDNRKSVQQQDNSIEHCENVENVGLWKEVESLKTGRNAVTQELVKLRQHQETADNKLLLLRDRLQGMEKNQQQMLSFLVMAMQSPGFLAQLLNKKENNWRIAEPGSIVEQGADDAEQLASEGMIVRYQPPVDEMFEPVHAPPIGPENPRESNPSSDGMKDFFVSPDFMELLMDENLGFENHTSFGLPELADDGSWEQLLLANPFIENIKDTKPGSEESTDTETDTGTTIVGTQLERSQSFEYLIEMMEKSNDLENKATDEGPHFEKSQKLEILTEQMGLLASEPNH

SEQ ID NO: 359 - DNA, 1182 bp, Populus balsamifera subsp. trichocarpa
  misc_feature: Ceres ANNOT ID no.1512410
  misc_feature: Encodes the peptide sequence at SEQ ID NO 360
atggtgaaatcaagcgatagtggggtggctcctttcttgaagaaatgctatgaaatggtaggtgatgagtcaacaaattcgataatctcatggagccaaaccaatgacagctttgtcatatgggacatgactgaattctgtgtccacttgttgcccaagtacttcaagcacagcaattcttctagttttgtcagacagctcaatatctatggatttagaaagattgatacagatcattgggaatttgcaaatgatggatttatcagagggcagaaacatttgttaaagaatatcagcaggaggaaaaattcacagggcacagacaatcgaaaattagtgcagcagcaggacaactccgtggaacaccatgaaagcgttgaaaatgcgggtctctggaaggaagttgagaacctaaagactggtaaaattgcactgacgcaggagttggttaagctcagccagcaccaggaaactgcagacaataagttgctccttttgagggatcggcttcagggaatggaaaagaatcagcagcagatgctgtctttcttagtgatggcaatgcaaaaaagcccagggtttctagctcagctactacacaaaaaggaaaataattggcggatggctgagccaggaagcattgtggaacaggttgcagatgatgctgacccattggcttctgaggggatgatagtaaagtaccagccaccagtggatgagacatttgagcccatgcatgcaccaccgattggtccagaaaatccacgagaatctaacccatcttctgatgggatgaaagattttttttttagttcagaattcacggagctgcttatggatgagaatttgggttttgaaaatcacgccccattcgttctaccagaattagcagatgatggtgcttgggagcagctgcttttagccaatccttttgttgcaaacattaaagattccgaaacagattatgaagagcccactgatgctgaaactgatacaggaacagcagttccaggaacacagctggacagatctcaagattttgaaaatttaattgaacaaatggagaagtatcataacttggaaaaccaagctactgatgaaggtcctcacttcgagaagcctcggaacttggaaattctaactaagcagatgggtcttttggcttctgagacaaaccactaa

SEQ ID NO: 360 - protein, 393 aa, Populus balsamifera subsp. trichocarpa
  misc_feature: Ceres ANNOT ID no.1512410
  misc_feature: Bit score of 120.1 for HMM based on sequences of FIGURE 12.
  misc_feature (10)..(184): Pfam Name: HSF_DNA-bind Pfam Description: HSF-type DNA-binding
  misc_feature: Functional Homolog Of Ceres LOCUS ID no. At1g32330 at SEQ ID NO. 311
MVKSSDSGVAPFLKKCYEMVGDESTNSIISWSQTNDSFVIWDMTEFCVHLLPKYFKHSNSSSFVRQLNIYGFRKIDTDHWEFANDGFIRGQKHLLKNISRRKNSQGTDNRKLVQQQDNSVEHHESVENAGLWKEVENLKTGKIALTQELVKLSQHQETADNKLLLLRDRLQGMEKNQQQMLSFLVMAMQKSPGFLAQLLHKKENNWRMAEPGSIVEQVADDADPLASEGMIVKYQPPVDETFEPMHAPPIGPENPRESNPSSDGMKDFFFSSEFTELLMDENLGFENHAPFVLPELADDGAWEQLLLANPFVANIKDSETDYEEPTDAETDTGTAVPGTQLDRSQDFENLIEQMEKYHNLENQATDEGPHFEKPRNLEILTKQMGLLASETNH

SEQ ID NO: 361 - DNA, 1584 bp, Sorghum bicolor
  misc_feature: Ceres ANNOT ID no.6035498
  misc_feature: Encodes the peptide sequence at SEQ ID NO 362
atgcagggcggtgtcgtggcccacgccgccgccgccgcggcggccgcgtcgacggtgaccactgcggtggcgcctccggtgccggcgcacgcggcggtggtgggaaacggcggcgggccggcggccgccgcgccgccgccaccgttccttatgaagacgtacgagatggtggacgacccggccaccgacgacgtcgtgtcctggggccccgggaacaacagcttcatcgtctggaacacgcccgagttcgccagggacctcctgcccaagtacttcaagcacagcaacttctcatcattcgtcaggcagctcaacacctacgggtttagaaaggttgatccagacagatgggaatttgcaaatgagggttttcttagaggacaaaaacatctgctgaagactatcaacagaaggaaaccatccttgcaggggaacagccaaccacagcaacctcagttgcagaatgctcctgtgccttcctgtgtagaggtgggcaagtttgggttggaggaagagatagaacggctgaaaagggataagaatgttcttatgcaagagcttgtcaggctgagacagcaacagcaaacaactgaccatcagcttcagactttgggcaagcgtcttcaagggatggagtcacggcagcaacagatgatgtctttcctggctaaggcaatgcaaagtcctggtttcctagcacagtttgtacagcaaaacgagaatagtagaagaagaatagtagctgcgaacaagaaaaggcggctacccaagcaagatggtggcctagactctgaaagtgctgctgcttcgttagacggtcaaattatcaagtatcaacctttgatcaacgaagcagccaaagcaatgctaaggaagatcctaaagctagattcttcgcataggtttgaatctatgggcaattcagataataataattttctgctggagaattatatgccagctgctcaagcttttgagagctcttcgtcaacaagaaattctggggtcacccttgcagaggttccagctaactcgggcttgccctatgtcagcgcaagctctggactgtcagctatctgttctccttcagtggctcctgaaatccagtgcccagttgtgctggacaacaagttgtctaaccaagtgcccaacatgagtgctgtgcctcctgtttcaaaccctataacagcaggctcaagtgacatcagcattccggaattctcagatctggcggacttggtaaacgaagactctgtcaatattcctggaggggcctttgagatgcctggtcctgagtttcccctgccagaaggtgatgacagtgtccccatcgagactgatgagaccatgtacaacaatgacgagactcagagccttccaggcatcatcgactccttctgggagcagttcctggtaggcagccctctatccgccgataatgatgaagttgattcaggcggactagatgcaaggggttcaccacaggagaatgggtggagcaaagtggggaacatctccaatcttacagaacagatgggccttctatcatcaacaaatcaccgggactcagggaatgggctgtaa

SEQ ID NO: 362 - protein, 527 aa, Sorghum bicolor
  misc_feature: Ceres ANNOT ID no.6035498
  misc_feature: Bit score of 1070.3 for HMM based on sequences of FIGURE 12.
  misc_feature (47)..(222): Pfam Name: HSF_DNA-bind Pfam Description: HSF-type DNA-binding
  misc_feature: Functional Homolog Of Ceres LOCUS ID no. At1g32330 at SEQ ID NO. 311
MQGGVVAHAAAAAAAASTVTTAVAPPVPAHAAVVGNGGGPAAAAPPPPFLMKTYEMVDDPATDDVVSWGPGNNSFIVWNTPEFARDLLPKYFKHSNFSSFVRQLNTYGFRKVDPDRWEFANEGFLRGQKHLLKTINRRKPSLQGNSQPQQPQLQNAPVPSCVEVGKFGLEEEIERLKRDKNVLMQELVRLRQQQQTTDHQLQTLGKRLQGMESRQQQMMSFLAKAMQSPGFLAQFVQQNENSRRRIVAANKKRRLPKQDGGLDSESAAASLDGQIIKYQPLINEAAKAMLRKILKLDSSHRFESMGNSDNNNFLLENYMPAAQAFESSSSTRNSGVTLAEVPANSGLPYVSASSGLSAICSPSVAPEIQCPVVLDNKLSNQVPNMSAVPPVSNPITAGSSDISIPEFSDLADLVNEDSVNIPGGAFEMPGPEFPLPEGDDSVPIETDETMYNNDETQSLPGIIDSFWEQFLVGSPLSADNDEVDSGGLDARGSPQENGWSKVGNISNLTEQMGLLSSTNHRDSGNGL

SEQ ID NO: 363 - DNA, 1362 bp, Arabidopsis thaliana
  misc_feature: Ceres LOCUS ID no.At2g26150
  misc_feature: Genomic Sequence
  misc_feature: Inplanta Sequence
  misc_feature: Encodes the peptide sequence at SEQ ID NO. 364
atggaagaactgaaagtggaaatggaggaagaaacggtgacgtttactggttctgtagcggcttcttcatctgtaggatcctcttcctctcctagaccaatggaagggcttaacgaaacagggccaccaccgtttctgactaagacttacgaaatggtggaagatccggcgacggacacggtggtttcttggagtaatggtcgtaacagctttgtggtgtgggattctcataagttctcaacaactctccttccacgttacttcaagcatagcaatttctcaagttttattcgtcagctcaatacttatgtaagtacctctttgcttccttatatctacttagtcttgtttctgtttttgtttctaatttttaattttggatttctttagatgggtttcctatgagtcttcagctataaaggttagttctttaagcttttaagtggctaaattgaaattagatgcattgagattttggtcatatgttaagagaatcatttaacataaactctgttcaatcctctgtttctgaagttcaaaatgtgtttggtagtaaaaacagaatcttggaatgataagtaaggactctgcctcaagttcagtagctgatgaaacttgttttggtgattgcagggattcagaaagattgatccagatagatgggaatttgcaaatgaagggtttttagcaggacaaaagcatctcttgaagaacatcaaaagaaggaggaacatgggtttgcagaatgtgaatcagcaaggatctgggatgtcatgtgttgaggttgggcaatacggtttcgacggggaggttgagaggttgaagagggatcatggtgtgcttgtagctgaggtagttaggttgaggcaacagcaacacagctccaagagtcaagttgcagctatggagcaacggttgcttgttactgagaagagacagcagcagatgatgacgttccttgccaaggcgttgaacaatccgaactttgttcagcagtttgcggttatgagtaaagagaagaagagtttgtttggtttggatgtggggaggaaacggaggcttacttctactccaagcttggggactatggaggagaatttgttacatgatcaagagtttgatagaatgaaggatgatatggaaatgttgttcgctgcagcaatcgatgatgaggcgaataattcgatgcctactaaggaggaacaatgtttggaggctatgaatgtgatgatgagagatggtaatttggaagcagcgttggatgtgaaagtggaagatttggttggttcgcctttggattgggacagccaagatctacatgacatggttgatcaaatgggttttcttggttcggaaccttaa

SEQ ID NO: 364 - protein, 345 aa, Arabidopsis thaliana; identical to SEQ ID NO: 350
  misc_feature: Ceres LOCUS ID no.At2g26150
  misc_feature: Bit score of 868.1 for HMM based on sequences of FIGURE 11.
  misc_feature (43)..(212): Pfam Name: HSF_DNA-bind Pfam Description: HSF-type DNA-binding

SEQ ID NO: 365 - DNA, 1857 bp, Populus balsamifera subsp. trichocarpa
  misc_feature: Ceres ANNOT ID no.1485538
  misc_feature: Encodes the peptide sequence at SEQ ID NO 366
atggatggaataaacaccactgcaagcggtggcgacgcctctactagcggcggtgtagcactagcggcgccggtgccgatggcgtcccagtcaaattctccgccgccatttctgagtaagacttacgacatggtagacgacccggagaccgacgccgtggtgtcttggagttcgacgaataatagttttgtggtttggaatccgccggagttcgctcgcgatcttttgccgaacaaccaaatggagcagaaactgaacaagaaaatagaagtgtgccttatgttgaccatacaagataaaaagctatctagtcaaggtgtcaatattatctcttgctgcatgtggaagttcagcaagagcttatctttcaactttgatattacatcaaggaaattctggcaaaattttccaagctgtctagaaaaggtgtccgtattttctcttgctgcatgtggaagctcagcaagagcttatcctttcaatttcaatattgtgtcaaggcaattctggcacttatttttaaatcaagaggaaatgcagtttcctttctcagaatacaggggggcattgtactccctacaaaagttggaatgcctttaccacgagcaaggttttcgaaaggtggatccagaccgttgggaattcgccaatgaaggatttttgaggggtcagaagcacctgcttaggactatcagtcggcgaaaacctgcccatggacatactaatcaacagccgcaacaagctcgtggacagaactcaactgttggcgcttgtgttgaggttggaaaatttgggcttgaggaagaggtagagaggcttaagagggacaagaatgttcttatgcaagaacttgttaggttgaggcagcagcaacagtccacggatagccagttgcaaaccatggtgcagcgacttcaagggatggagcagcgtcagcaacagatgatgtcattcctggcaaaggctatgcagagcccgggcttcctggctcagtttgtacagcagcaaaatgaaagcagcaggcgcataacagaagccaacaaaaaacgaaggctcaagcctgaggatgtttctgagaatgagggttctagtgctcctgatggacagattgtgaagtatcagcctcagatgaacgaggcagccaaagcaatgctcaggcaggtcatgaaaatggatgctccttctaggttggaatcttatgacaccaatcttgatggcttcctgattggtaatggttcaccatcatctagtgcaaaagacagcggaagctcttcaagccgcatgtcaggagtgactcttcaagaggtcccagcagcttcagggatttccggacatggccccatggctgccatatctgaaatacaatcttccccacacattgctagctcagaaaaggctacagcttctcagtttccggaaagtatactggttggaggacaaggagcaccctccatacctattccacaggcagatataatcatgccccaggtttctcaaaagccagaaatggtgccagaaattattgctgatattcctggtgaagattacatggaaccagagacaagcagtgatgtgttcctagatccagcttcacttggaattaatgatacaatacccatagatattgacaacatctcccctgatcctgatatcgatgctttgcttgataattctagcttctgggatgaccttcttgcgcagagtccagtgcctgaggatattgaatcaagttctgtggagggtaaagccaatggaaatgatgtacatcaaattataaacgggtgggacaaagctcagcatatggatcagctgacagaacaaatgggacttctctcatcagatcgcaagcagctttaa

SEQ ID NO: 366 - protein, 618 aa, Populus balsamifera subsp. trichocarpa
  misc_feature: Ceres ANNOT ID no.1485538
  misc_feature: Bit score of 568.2 for HMM based on sequences of FIGURE 11.
  misc_feature (204)..(319): Pfam Name: HSF_DNA-bind Pfam Description: HSF-type DNA-binding
  misc_feature: Functional Homolog Of Ceres LOCUS ID no. At2g26150 at SEQ ID NO. 364
MDGINTTASGGDASTSGGVALAAPVPMASQSNSPPPFLSKTYDMVDDPETDAVVSWSSTNNSFVVWNPPEFARDLLPNNQMEQKLNKKIEVCLMLTIQDKKLSSQGVNIISCCMWKFSKSLSFNFDITSRKFWQNFPSCLEKVSVFSLAACGSSARAYPFNFNIVSRQFWHLFLNQEEMQFPFSEYRGALYSLQKLECLYHEQGFRKVDPDRWEFANEGFLRGQKHLLRTISRRKPAHGHTNQQPQQARGQNSTVGACVEVGKFGLEEEVERLKRDKNVLMQELVRLRQQQQSTDSQLQTMVQRLQGMEQRQQQMMSFLAKAMQSPGFLAQFVQQQNESSRRITEANKKRRLKPEDVSENEGSSAPDGQIVKYQPQMNEAAKAMLRQVMKMDAPSRLESYDTNLDGFLIGNGSPSSSAKDSGSSSSRMSGVTLQEVPAASGISGHGPMAAISEIQSSPHIASSEKATASQFPESILVGGQGAPSIPIPQADIIMPQVSQKPEMVPEIIADIPGEDYMEPETSSDVFLDPASLGINDTIPIDIDNISPDPDIDALLDNSSFWDDLLAQSPVPEDIESSSVEGKANGNDVHQIINGWDKAQHMDQLTEQMGLLSSDRKQL

SEQ ID NO: 367 - DNA, 1512 bp, Populus balsamifera subsp. trichocarpa
  misc_feature: Ceres ANNOT ID no.1538505
  misc_feature: Encodes the peptide sequence at SEQ ID NO 368
atggattgtcaacagtcttctagtgcagggtcgatatttgttgaagatttaagcttccctgctgccgcaccttctcctttaatggacctggaggctttctcctatgtaagcccgacgacttcagctcatccagtatcatcatcggcgactgccaacgaggtggatgaggaagaggagatgccacgtcctcttgtgtgcttacaggagaatccagtaccgccttttctatcgaaaacatatgatctggtggatgatcggatgctggacccaataatttcgtggggttccattggggagagtttcgtggtgtgggaccccgaggagttcgccaggcttgttctccctcggaatttcaagcacaacaatttctccagttttgtccgacaactcaatacttatgggttccgcaagattgatactgatcgatgggagtttgccaatgaatctttcagaagaggcgagaagcatctgttgaagaacattcataggcgcaaatcaacacagtcccagcaggttgggagccacacggggtctttaactgaagcagggaggtctggattggatagtgaggtagaaagattaaggaaggagcggagtgtgatgatgcaggaagttatagaactgcagaagcagcagtctgggactgttcacgatgtgcaatcagtaaatcagagacttcaggcagcagagcaaaggcagaagcagatggtttcgttcttggcaaagttgtttcagaatccagcattcttagcccgtctcaagcaaaagaagcaacagggagagattggttcatcaaggatgaagaggaagtttgttaagcaccagcaacaccaacatgccctacctgaatcatcaatggaagggcagattatgagatacatgcctgattggagaaacatcacattatcttctgtggtcccggatacaagtccagcctctattgatcaatctcctgattatctctcagaaggcatggtaggcctgggtcttggcagtgaagcaatgccattacctgaaattgttgcacctgatgaatttgccatctcagacgaattaggattgggacagggatttatcaaaacaccagagcaggttggagaagggcaatcaagcatgcaatttgaagatcccaagctcaaaggaaagattgatatgagcccgcaaaatgaggctggtcttgaatattttgtctcttttcctgaggatttggggatggagaaaagctttccagaattatcttcccctggcatggaaagaattgttaaacaagaggatgtatggagtttggcatttaacactagtgctggtatgtctagttctagcaatgttccatgggataattttttcggatatgatatgccagagttgggatcaacaggtggcttctcagatatctgggatataggttctggacaagcaggaggaggtttgagcatggataagtggctggctgatgaaagtcccgttgatgagtctgatagtcaagctggccagccaaaagatgataaataa

SEQ ID NO: 368 - protein, 503 aa, Populus balsamifera subsp. trichocarpa
  misc_feature: Ceres ANNOT ID no.1538505
  misc_feature: Bit score of 152.5 for HMM based on sequences of FIGURE 11.
  misc_feature (73)..(240): Pfam Name: HSF_DNA-bind Pfam Description: HSF-type DNA-binding
  misc_feature: Functional Homolog Of Ceres LOCUS ID no. At2g26150 at SEQ ID NO. 364
MDCQQSSSAGSIFVEDLSFPAAAPSPLMDLEAFSYVSPTTSAHPVSSSATANEVDEEEEMPRPLVCLQENPVPPFLSKTYDLVDDRMLDPIISWGSIGESFVVWDPEEFARLVLPRNFKHNNFSSFVRQLNTYGFRKIDTDRWEFANESFRRGEKHLLKNIHRRKSTQSQQVGSHTGSLTEAGRSGLDSEVERLRKERSVMMQEVIELQKQQSGTVHDVQSVNQRLQAAEQRQKQMVSFLAKLFQNPAFLARLKQKKQQGEIGSSRMKRKFVKHQQHQHALPESSMEGQIMRYMPDWRNITLSSVVPDTSPASIDQSPDYLSEGMVGLGLGSEAMPLPEIVAPDEFAISDELGLGQGFIKTPEQVGEGQSSMQFEDPKLKGKIDMSPQNEAGLEYFVSFPEDLGMEKSFPELSSPGMERIVKQEDVWSLAFNTSAGMSSSSNVPWDNFFGYDMPELGSTGGFSDIWDIGSGQAGGGLSMDKWLADESPVDESDSQAGQPKDDK

SEQ ID NO: 369 - protein, 508 aa, Lycopersicon peruvianum
  misc_feature: Public GI ID no.8347238
  misc_feature: Bit score of 172.9 for HMM based on sequences of FIGURE 11.
  misc_feature (95)..(258): Pfam Name: HSF_DNA-bind Pfam Description: HSF-type DNA-binding
  misc_feature: Functional Homolog Of Ceres LOCUS ID no. At2g26150 at SEQ ID NO. 364
MNPFDKKQEPDTDSKTPFLTEMDSEFAAFSPISLPFADPSSPFINFGSFATPLSQHPVGEGEREGEGEGGEIEQPAEGGLGVPQPMECLHGIQIPPFLSKTFDLVEDPLLDTIISWGTNGESFVVWDPVEFSRLVLPRNFKHSNFSSFVRQLNTYGFRKIDADRWEFANEGFSRGKRHLLKNIQRRRSQQGGSSSGSSAEAGKGTMDEIEKLRNEKSLMMQEVVELQQQQHGTVQLMESVNEKLQAAEQRQKQMVSFLAKVLQNPTFLARVRQMKEQGEITSPRTMRKFVKHQSHGPDGVGSSSMEGQIVKFRSDFQDLAGCFDSPDFNPVVDQQLPETGLGAEAMPFEGGPVADGLTVAHELLNCSDREIRGASFFNSGGSQFKGKNVASPQIEVMPEYFASFPEEMGKEKNISGFSAPAIGSMVKDEELWGMGFEASAGMPSTGPELWDSLSSYVPDFGVSSGLSDLWDIDPLQVAGSSGVDKWPADGSPFGQSESHANQPKNDSF

SEQ ID NO: 370 - protein, 406 aa, Oryza sativa subsp. indica
  misc_feature: Public GI ID no.125542955
  misc_feature: Bit score of 239.4 for HMM based on sequences of FIGURE 11.
  misc_feature (49)..(225): Pfam Name: HSF_DNA-bind Pfam Description: HSF-type DNA-binding
  misc_feature: Functional Homolog Of Ceres LOCUS ID no. At2g26150 at SEQ ID NO. 364
MGSKKRSPQHPAAAAPPPAVGGGGGGEVSGDGGASTANGPVVPKPSEVAPFLTKVYDMVSDPATDNVISWAEGGGSFVIWDSHAFERDLHRHFKHSNFTSFIRQLNTYGFRKVHPDRWEWANEGFIMGQKHLLKTIKRRKKSSQEAPSEIQKAPVKTAPGTENIEIGKYGGLEKEVETLKRDKALLMQQLVDLRHYQQTSNLEVQNLIERLQVMEQNQQQMMALLAIVVQNPSFLNQLVQQQQQQRRSNWWSPDGSKKRRFHALEQGPVTDQETSGRGAHIVEYLPPVPETSGQVNPVEGAICSANSQPVPSPAVATPMDMQTSNVADTLGSSEEPFADNSTLHEWDDNDMQLLFDDNLDPILPPFENDGQMGPPLSVQDYDFPQLEQDCLMEAQYNSNNPQYGND

SEQ ID NO: 371 - protein, 475 aa, Oryza sativa subsp. japonica
  misc_feature: Public GI ID no.115446219
  misc_feature: Bit score of 199.3 for HMM based on sequences of FIGURE 11.
  misc_feature (19)..(186): Pfam Name: HSF_DNA-bind Pfam Description: HSF-type DNA-binding
  misc_feature: Functional Homolog Of Ceres LOCUS ID no. At2g26150 at SEQ ID NO. 364
MEVAAGARGGGAGGGGGGPAPFLLKTYEMVDDPSTDAVVSWSDASDASFVVWNHPEFAARLLPAYFKHSNFSSFIRQLNTYGFRKIDPERWEFANEYFIKGQKHLLKNIHRRKPIHSHSHPPGALPDNERAIFEDEIERLSREKSNLQADLWKSKQQQSGTMNQIEDLERRVLGMEQRQTKMIAFLQQASKNPQFVNKLVKMAEASSIFTDAFNKKRRLPGLDYSIENTETTSFYDDHSSTSKQETGNLLNQHFSDKLRLGLCPAMTESNIITLSTQSSNEDNRSPHGKHPECDMMGRECLPLVPQMMELSDTGTSICPSKSSCFAPPISDEGLLTCHLSLTLASCSMDVDKSQGLNANGTTIDNPTEAATATMEKDDTIDRSFDDNQKKSADSRTADATTPRADARVASEAPAAPAAVVNDKFWEQFLTERPGCSETEEASSGLRTDTSREQMENRQAYDHSRNDREDVEQLKL

SEQ ID NO: 372 - DNA, 2183 bp, Zea mays
  misc_feature: Ceres CLONE ID no.1597127
  misc_feature: Encodes the peptide sequence at SEQ ID NO 373
aacagatacatggccggccgtctctgagccggtctcccggcagcagcagtcccccgggttgtccacgcggagcgccagccgatggccggccacagtatgtcggttcacccgaagcctataaattcctcgccgccccgcctctcgccgcccatttccctccgccgcctcctaattctcaacacccgcgcccccaccgcgcccgtcgtatgccaccatgcaccgcgcccgccccaccgcgcacgctaatgaccccgatgctccgtacgccgccgccgacgccgcgatgctgctggagcccaaactcgaggacgaggagttgctgctggagcccaaactcgaggacgaggagttgccgctgcagcagctggcgtccccgggcaccttcgtgtccctggaccagctgatgccgccggtgaccgcgccagccgagccgcgcccgctggaggcgctgctgcacggcccgcagctgccgcccttcctgtccaagacgtacgacctggtgaacgagccggcgctggacggggtcatctcctggggcgctgccgggaacagcttcgtcgtgtgggacccctccaccttcgcgcgggatgtgctgccgcacaacttcaagcacaacaatttctccagcttcgtcaggcagctcaacacctatggtttccgcaaggttcatgctgacagatgggagtttgctcacgaagatttcctgcgagatagcaagcatctattgaagaggattgtcaggcgcaggtcctccccaacaaaacaaagcagcgttcagcctggctcttcttctggagaatccagcttggaccctgagctccacacgctgaggagagagaagaacgcgctgcttgaagaagtagcaaggttgaaacaggaacaccgccagacaattgagcaaatgagcacgctgaatcacaggctggaatctgcagaggaccggcagaggcagatggtctctttcctggccaagctccttcagaacccgagtttcgtgaggaagctgaagctgcacagggagaagaaggagatcgactccaccagggtgaaaagaaagtttctcaaacatgttcctcatggcagcgtagagtcaggtgaatccagctcacagcacgccggagagagtggttcgtatttcgctgtgagttcccccatggctacaactacaagcgtgcatgacgacatcacggagcttcagaactttcttttggaagatgatgatctcaacttcggcatggattcagagaacaccgggcttgaaggcaccgaggcaacagatgatattggagaactgatttaggggttcgacacacaagaggaacttgacctcggcagtggagctgagctacaggagatgcctccagcttctggttctcttgctcaagatcccacaatcggcaggttcaagggaaagaatgtgctgtgtccaggactggacgctacctcctccgaaggcgactgcctcagtccattgcctgacaacatggggctgctttcaggcaccatgctagggacagcaggaagcatgatggccgctgacgatgagcaaatatggggcgttgatgcttcggcagccctgcaaagctcttgcagtggcactagccaacaagctttcggtagccatgccagtgatccctatctgatggacatcgccaacaggcctgagagattctgggagcttgatttccaggcactggatgaggctgatctgcagctggacaagtgtgctatcgatgaccctgctcttcagcagcagccaagcatgaagaagccgtagacgtggtgctttatccactgaagtgctacgattaacttatggacattgctatagttacttcggtatttgggagcgaggctgatgaactcgcctactatggcacttaatagtagcagcagcagtagtatgtttttgtttcccatttattcacccccggtgtttttgaatggaaacttgtatcctagtgatttcttcagagcagctgttaactgctctggcttattctttttttgtttccatttatgtttttgttctgattcttttacttgctagttgctacttgcgaatgtcttgcaatgagtaatgggattttaaaaaaaatccgttctcagagaaccaaacgatgtactgatgtgctgctgaatgccaagaagtggctgaattctgtttaaaaaaaaaaaaaaaa

SEQ ID NO: 373 - protein, 361 aa, Zea mays
  misc_feature: Ceres CLONE ID no.1597127
  misc_feature: Bit score of 145.7 for HMM based on sequences of FIGURE 11.
  misc_feature (86)..(251): Pfam Name: HSF_DNA-bind Pfam Description: HSF-type DNA-binding
  misc_feature: Functional Homolog Of Ceres LOCUS ID no. At2g26150 at SEQ ID NO. 364
MHRARPTAHANDPDAPYAAADAAMLLEPKLEDEELLLEPKLEDEELPLQQLASPGTFVSLDQLMPPVTAPAEPRPLEALLHGPQLPPFLSKTYDLVNEPALDGVISWGAAGNSFVVWDPSTFARDVLPHNFKHNNFSSFVRQLNTYGFRKVHADRWEFAHEDFLRDSKHLLKRIVRRRSSPTKQSSVQPGSSSGESSLDPELHTLRREKNALLEEVARLKQEHRQTIEQMSTLNHRLESAEDRQRQMVSFLAKLLQNPSFVRKLKLHREKKEIDSTRVKRKFLKHVPHGSVESGESSSQHAGESGSYFAVSSPMATTTSVHDDITELQNFLLEDDDLNFGMDSENTGLEGTEATDDIGELI

SEQ ID NO: 374 - DNA, 2272 bp, Zea mays
  misc_feature: Ceres CLONE ID no.1584568
  misc_feature: Encodes the peptide sequence at SEQ ID NO 375
acctccgcctcccggcgcccgcatcgcctctcgcctgcgctgcgctttctttcccccaagatattttccggccgctctaccctgtagctgtagcgcgtgcgcgcaccgccttgccctgcggtccgcagccacgagactgccctgccccgccgccaagtggccagaatcccgccgcggggcccgccgcgatcgcccaccaaaaccaccctcgggctcgggtatactacacagatacatggccggccatctctgagccggtctcccggcagcagcagtccctcgggttgtccacgcggagcgccagccgatggccggccacagtatgtcggttcacccgaagcctataaattcctcgccgccccgcctctcgccgccccgcctctcgccgccccgcctctcgccgcccatttccctccgccgcctcctaatcctcaacacccgcgcccccaaccgcgcccgtcgtatgccaccatgcaccgcgcccgccccaccgcgcacgctaatgaccccgatgctccgtacgccgccgccgtcgcgatgctgctggagcccaaactcgaggacgaggagttgccgctgcagcagctggcgtccccgggccccttcgtgtccctggaccagctgatgccggcggtggccgtgccggccgaaccgcgcccgctggaggcgctgctgcaaggcccgcagctgccgcccttcctgtccaagacgtacgacctggtgaacgagccggcgctggacggggtcatctcctggggcgctgccgggaacagcttcgtcgtgtgggacccctccaccttcgcgcgcgacgtgctgccgcacaacttcaagcacaacaatttctccagcttcgtcaggcagctcaacacctatggtttccgcaaggttcatgctgacagatgggagtttgctcacgaagatttcctgcgagatagcaagcatctattgaagaggattgtcaggcgcaggtcctccccaacaaaacaaagcagcgttcagcctggctcttcttctggagagtccagcttggaccctgagctccacacgctgaggagagagaagaacgcgctgcttgaagaagtagcaaggttgaaacaggaacaccgccagacaattgagcaaatgagcacgctgaatcacaggctggaatctgcagaggaccggcagaggcagatggtctctttcctggccaagctccttcagaacccgagtttcgtgaggaagctgaagctgcacagggagaagaaggagatcgactccaccagggtgaaaagaaagtttctcaaacatgttcctcatggcagcgtagagtcaggtgaatccagctcacagcacgccggagagaatggttcgtatttcgctgtgagttcccccatggctacaactacaagcgtgcatgacgacatcacggagcttcagaactttcttttggaagatgatgacctcaacttcggcatggattcagaaaacaccgggcttgaaggcaccgaggcaacagatgatattggagaactgattcaggggttcgacacacaagaggaacttgacctcggcagtggagctgagctacaggagatgcctccagcttctggccctcttgctcgagatcccacaatcggcaggttcaagggaaagaatgtgctgtgtccaggactggacgctacctcctccgaaggcgactgcctcagtccattgcctgacaacatggggctgctttcaggcaccatgctagggacggcaggcagcatgatggccgctgacgatgagcaaatatggggcgttgatgcttcggcagccctgcaaagctcttgcagtggcactagccaacaagctttcggtagccatgctagtgatccctatctgatggacatcgccaacaggcctgagagattctgggagcttgatttccaggcactggatgaggctgatctgcagctggacaagtgtgctatcgatgaccctgctcttcagcagcagccaagcatgaagaagctgtagacgaatttccgttgtcagacagacagtatggtggtgcttcatccactgaagtgctacaattaacttatggagattgctatagttacttcggtattttggagcgaggctgatgaactcgcctactatggcacttagtagtagcagcagcagtagtatgtttttgtttcccatttattcacccccggtgtttttgaatggaaacttgtatcctagtgatttcttcagagcagctgttaactgctctggccgattcaaagaaaaaaaaaaaaaaaaa

SEQ ID NO: 375 - protein, 508 aa, Zea mays
  misc_feature: Ceres CLONE ID no.1584568
  misc_feature: Bit score of 175.9 for HMM based on sequences of FIGURE 11.
  misc_feature (74)..(239): Pfam Name: HSF_DNA-bind Pfam Description: HSF-type DNA-binding
  misc_feature: Functional Homolog Of Ceres LOCUS ID no. At2g26150 at SEQ ID NO. 364
MHRARPTAHANDPDAPYAAAVAMLLEPKLEDEELPLQQLASPGPFVSLDQLMPAVAVPAEPRPLEALLQGPQLPPFLSKTYDLVNEPALDGVISWGAAGNSFVVWDPSTFARDVLPHNFKHNNFSSFVRQLNTYGFRKVHADRWEFAHEDFLRDSKHLLKRIVRRRSSPTKQSSVQPGSSSGESSLDPELHTLRREKNALLEEVARLKQEHRQTIEQMSTLNHRLESAEDRQRQMVSFLAKLLQNPSFVRKLKLHREKKEIDSTRVKRKFLKHVPHGSVESGESSSQHAGENGSYFAVSSPMATTTSVHDDITELQNFLLEDDDLNFGMDSENTGLEGTEATDDIGELIQGFDTQEELDLGSGAELQEMPPASGPLARDPTIGRFKGKNVLCPGLDATSSEGDCLSPLPDNMGLLSGTMLGTAGSMMAADDEQIWGVDASAALQSSCSGTSQQAFGSHASDPYLMDIANRPERFWELDFQALDEADLQLDKCAIDDPALQQQPSMKKL

SEQ ID NO: 376 - DNA, 1618 bp, Zea mays
  misc_feature: Ceres CLONE ID no.286056
  misc_feature: Encodes the peptide sequence at SEQ ID NO 377
aaaaaacaccaacccacccaccagcctattatactcaacgcgacgaactcatctcaccaccgcgccctccgccggatggagcggccagacgtgacggtcaagcaggaggaagacgaagtggtggtggtgttggacgccgacggcgatgcttgcgggcactggccgggagcccgcgcggcgccggagccttggcagacgccggtgggatccgcggttccgccgttccttgcgaagacgttcgagcttgtggaggacccggcgacggacgccgtgatatcgtggggcgccgcgcggaacagcttcgtggtgtgggatccacacgccttcgcggcggggcaccttccgcgccgcttcaagcacggcaacttctccaccttcctccggcagctgaacacctacgtccgtaatcacatatctcaattcgtaattaacaaacattgcaatggattccgcaaggtgagcccggacaggtgggagttcgcgcacgccgacttcctcgcggggcagcggcacctcctcgtgaacatccggcggcgccgcgggggcgtcgcgggacccacagcatctccgtcttcggcgggagccggcggcgaccgtgatagcgagctcgagaggctgcggcgggaccgggaggcgctggcgagggagctgacgcggctgcggcgcgagcaggaggaggcccgcgcgcagctgctggacatggagcggcgcgtgcggggcacggagcggcggcaggagcagtgcaccgccttcctggcgcgcgccatccggaacccgaccttcctggacggcctgctggcgcgccgctgtggcgcgcacgtagaggccggcaggaagcggcggctgctcgatgccgctgcggccggccctgacccagcggacgtcctcgacatcgaggagctggcgatggttgcgggcgccgaggtcggtgtggcttccatcccagccgttgcagcggcgcagatttccaacacagccaacgccacggacatgatatggtacgagcttctcggggaggagcaggtggagatcgacgccgaggtgcacgacctcgtcgtggccgccgcggctgccactgatgagttggcgcagccgtgggcggagatggacgagaaagaggttgcggagcttgtgcggcagatagactgccttgcctcgccgagtccctgatcagtgatcaccacgaggtggagaccgtgcagctagttgcacctgtaatatggtgctccctacggagagcaactacctaccactagtccactattagccatgcattgcctgtgtcactggcaatgccattggcatatgacggctgctgaagtacaatggtggcgctggtactgtggtacggtactgcagtgcgccacgctctggattggaccctaatggtcatttggtgtgtagtgtcgttagccttgctgtttgattgtggttattggattattaggtctgcgatatgctaatttggattctgcatctgttttgtgggatccgacagtggcggtatgctgcacacaaaccggccgtggtgatggatgcagcagcctgatccagttagttgatgtattcttaagaatttgaccaaagagcaactctaaccaagccttaaatttttgcc

SEQ ID NO: 377 - protein, 364 aa, Zea mays
  misc_feature: Ceres CLONE ID no.286056
  misc_feature: Bit score of 171.8 for HMM based on sequences of FIGURE 11.
  misc_feature (48)..(205): Pfam Name: HSF_DNA-bind Pfam Description: HSF-type DNA-binding
  misc_feature: Functional Homolog Of Ceres LOCUS ID no. At2g26150 at SEQ ID NO. 364
MERPDVTVKQEEDEVVVVLDADGDACGHWPGARAAPEPWQTPVGSAVPPFLAKTFELVEDPATDAVISWGAARNSFVVWDPHAFAAGHLPRRFKHGNFSTFLRQLNTYVRNHISQFVINKHCNGFRKVSPDRWEFAHADFLAGQRHLLVNIRRRRGGVAGPTASPSSAGAGGDRDSELERLRRDREALARELTRLRREQEEARAQLLDMERRVRGTERRQEQCTAFLARAIRNPTFLDGLLARRCGAHVEAGRKRRLLDAAAAGPDPADVLDIEELAMVAGAEVGVASIPAVAAAQISNTANATDMIWYELLGEEQVEIDAEVHDLVVAAAAATDELAQPWAEMDEKEVAELVRQIDCLASPSP

SEQ ID NO: 378 - DNA, 1299 bp, Populus balsamifera subsp. trichocarpa
  misc_feature: Ceres ANNOT ID no.1543432
  misc_feature: Encodes the peptide sequence at SEQ ID NO 379
atggaagcgggatcatcgccatccgccgccgccggcggaggaccggcgccgttcttgataaagacatatgacatggtggatgattcatcgactgacgagattgtgtcttggagttcgaacaaaaacagctttgtcgtatggaaccctccagaattcgccagattgttgcttcctacctttttcaagcacaataatttctctagctttatcagacaattaaatacctatggatttagaaagattgatcctgagaaatgggaatttgccaatgaagattttttgaaagatcagaagcatctgcttaagaacatccacagaagaaaaccaatccacagtcacagcaaccctcaaggttctttagtggatcaagaaagagcagcatatgaggaagaaatagacaagctttcacgtgataaagccaaactcgaggcaagtattctagggttttcacagcagcggtcatctgcaaagcttcatgtggaagatctaacacagaggatagatactatgcagcagaggcaggaaaagttgctgtcgttcttagagaaggctgttcaaaaccctgcttttgttgaacatcttgcttgtaagattgaatctatggatttttcagcatatagcaagaagagacgactgcctcaagttgatcactcaatgccaactgcagaaaatagttttgtcgaaaatcactgtagttctaggcctgagtctaatgtcatccatcaagatttctcaaataagttgaggctggaattatcaccagctgtttcagatattaatttgatttcacgtagtacgcagagctccaatgaagacgggggaagcccacaaaggaaaatatctgaagggaatccaaaagatggacctactaggacatcaggtttactattggcacctgaaacattggaactttcggatactgggacatcgtatacatttaaagtgaatcctgctgtcccaagagacttaccagcaagtgggagccaagcacaacattcactgcaggcgaatttgacttccaatgaagaagttgatggccttatttcctgtcaattgaacctaactctggcatcttctgcattgcaagagatcccaaataacagtcaagtgcctgcatcagctccagctagagtcaatgatggtttctgggaacagttcctaactgaaagaccgggctcttatgaaaatgaagaggcaagttctaattaccgagcaaactcttatgatgagcaggatgaaagaaggttaggtttcggagtgccaagaaatgctaaaaacatggagcagctctctctatga

SEQ ID NO: 379 - protein, 432 aa, Populus balsamifera subsp. trichocarpa
  misc_feature: Ceres ANNOT ID no.1543432
  misc_feature: Bit score of 145.9 for HMM based on sequences of FIGURE 11.
  misc_feature (15)..(109): Pfam Name: HSF_DNA-bind Pfam Description: HSF-type DNA-binding
  misc_feature: Functional Homolog Of Ceres LOCUS ID no. At2g26150 at SEQ ID NO. 364
MEAGSSPSAAAGGGPAPFLIKTYDMVDDSSTDEIVSWSSNKNSFVVWNPPEFARLLLPTFFKHNNFSSFIRQLNTYGFRKIDPEKWEFANEDFLKDQKHLLKNIHRRKPIHSHSNPQGSLVDQERAAYEEEIDKLSRDKAKLEASILGFSQQRSSAKLHVEDLTQRIDTMQQRQEKLLSFLEKAVQNPAFVEHLACKIESMDFSAYSKKRRLPQVDHSMPTAENSFVENHCSSRPESNVIHQDFSNKLRLELSPAVSDINLISRSTQSSNEDGGSPQRKISEGNPKDGPTRTSGLLLAPETLELSDTGTSYTFKVNPAVPRDLPASGSQAQHSLQANLTSNEEVDGLISCQLNLTLASSALQEIPNNSQVPASAPARVNDGFWEQFLTERPGSYENEEASSNYRANSYDEQDERRLGFGVPRNAKNMEQLSL

SEQ ID NO: 380 - DNA, 1647 bp, Panicum virgatum
  misc_feature: Ceres CLONE ID no.1728062
  misc_feature: Encodes the peptide sequence at SEQ ID NO 381
gtccctccggccctcccctaccaaactcccctctctctcgccgcgcaacagcaccaccacgcgctgccgaatcgctgtgtcatggaggtcgccggcgcccgcgggtccggcggcggcggcggcggcggaccggcgccgttcctgctgaagacgtacgagatggtggacgacccgtccagcgacgcggtggtgtcgtggagcgacgcctctgacgggagcttcgtggtctggaacccgcccgagttcgcggcccggatgctgcccacctacttcaagcacagcaacttctccagcttcatccgccagctcaacacctacggatttcgcaaaattgacccggagcgctgggaatttgctaatgagtactttgtcaagggacagcagcacctgctgaagaatatccacaggcgaaagcccatccacagccacagccatcaacctggtgccctgcctgacaatgagcgtgcattatttgaggatgagattgaccggctttcacaggagaaagctgcccttcaggctgacctctggaagttcaatgagcagcagtcgggggccgtgagccagattgaatatcttgagcagcgggtgctcgacatggagcaacggcaggtcaagatgctcagcttcctgcagcaggctagcaagaaccctcagtttgtcagcaagctcgctaagatggcagagacctccccaatcttcgcagacgcatttcacaagaagcgaaggctacctgggttggaatgcagcgccgaggccgctgaaactaccagtagcttttatgatgaccacagcagcacctccaggcaagaaatgggcaacgctttgaaccagcacttctccgacaagctgaagctggggctctgtcctgcgatgaccgagagcaacctcacccaaagctcgcacgaagataacgggagtcctcacgggaagcatccaaattgcgagagaccgggcgtggagtgcctcccgctagttccacagatgatggagctctctgacactgggacatccatctgcccctcgaaagggcagagcgtgagcttcgccgcagccgcgaacaacgacgggctcctgccgtgccacctcaacctcaccctcgcgtcgtgctccatggacgtcaacagaagccaaacctccgacgcgaatgtgaacgctatggaagaggaggacagcccagcggaggcgaccactacagccaccatggaggaagacgacggcatcggcacacgccagggtgatacgcagcacaaggtttcaggcgactcagccactgcagtagtggacccgacggtgccgccacatggggacagccagcaagctccccctccacacgaagaagctgcagctccccctgttgtggcgaacgacaagttctgggagcagttcctgacggagaggccggggtgcacggaagccgaggaagcaagctccacgctgaggagggaagatccgtaccaggacacgaggagtgacaggagagagatgggtcagctgaagctctgaccttcaggttagcatgaccactatgcatacagcatacgtacagtgtttgttataagggaatatatctagtgcaaaccaatgacctcgtacaaattcgtgcaaatctactaaacaaagctttaaaaaaaaaaaaaaaaaaaa

SEQ ID NO: 381 - protein, 474 aa, Panicum virgatum
  misc_feature: Ceres CLONE ID no.1728062
  misc_feature: Bit score of 162.5 for HMM based on sequences of FIGURE 11.
  misc_feature (17)..(184): Pfam Name: HSF_DNA-bind Pfam Description: HSF-type DNA-binding
  misc_feature: Functional Homolog Of Ceres LOCUS ID no. At2g26150 at SEQ ID NO. 364
MEVAGARGSGGGGGGGPAPFLLKTYEMVDDPSSDAVVSWSDASDGSFVVWNPPEFAARMLPTYFKHSNFSSFIRQLNTYGFRKIDPERWEFANEYFVKGQQHLLKNIHRRKPIHSHSHQPGALPDNERALFEDEIDRLSQEKAALQADLWKFNEQQSGAVSQIEYLEQRVLDMEQRQVKMLSFLQQASKNPQFVSKLAKMAETSPIFADAFHKKRRLPGLECSAEAAETTSSFYDDHSSTSRQEMGNALNQHFSDKLKLGLCPAMTESNLTQSSHEDNGSPHGKHPNCERPGVECLPLVPQMMELSDTGTSICPSKGQSVSFAAAANNDGLLPCHLNLTLASCSMDVNRSQTSDANVNAMEEEDSPAEATTTATMEEDDGIGTRQGDTQHKVSGDSATAVVDPTVPPHGDSQQAPPPHEEAAAPPVVANDKFWEQFLTERPGCTEAEEASSTLRREDPYQDTRSDRREMGQLKL

SEQ ID NO: 382 - DNA, 1224 bp, Populus balsamifera subsp. trichocarpa
  misc_feature: Ceres ANNOT ID no.1448950
  misc_feature: Encodes the peptide sequence at SEQ ID NO 383
atggatgaatcacagggcagtccgaactcgctgccgccttttcttgcaaagacgtatgagatggtggatgatccttcgacggatccaattgtttcttggagtcagagcaataagagttttactgtatgggatccaccggagtttgccagggatttgctgcccagattttttaagcataataacttctctagcttcatcagacagctcaatacttatggttttaggaaaattgatcccgagcaatgggaatttgctaatgaagattttataagaggtcaaccatttctaatgaagaacatccatagacggaagccagttcatagccattcgttgcagaatcttcaaggacaaggctctaatctgctgactgattcagaaagacagagtatgaaggatgatatagagaggcttaaacgtgataaagaagcacttattttggagttacaaatgcaggaacaagagcggaaaggatttgagatgcaaattgagggtttgaaagagaagttgcaacaaatggaacgaagacaacaaactatggtatcttttgtgacccgagtgatgcctaaaccaggtcttgccttaaatctaatgccgcagttggaaggtcatgatagaaagagaaggctgccgagaattggttgtctacacagtgaagccagtagtaatgaggataatcagacggtgacttcccaagctctgtctagagaaaatgcagatggtaattcttttgccctgttaaacatggagcagtttgatcagttggaatcatccctgacattctgggagaatatggtaaatgatgttgttcaaacccacagtcataacactaaaacgatagagatggatgagtctacaagtggtgcagaaagtccagctatatcttgtgcacagctcatttttgattttcgccctaaaacacctggtattgacatgaattctgaaccttctatagctgttgtgccagagcctgtttcaccgaaggaacaacctgctgggactgctcccgctgtggcaactggagtcaacgatgtattctgggaacagtttttaactgagaatcctggttcaactgacacacaggaagttcaatctgaaagaaaggattctgatggtagaaaaaatgaaataaaacctggtgatcccagaaaattttggtgggatatgaggaatgtaaataatcttacagagcagatggggcatcttactcctgctgaaagaacttga

SEQ ID NO: 383 - protein, 407 aa, Populus balsamifera subsp. trichocarpa
  misc_feature: Ceres ANNOT ID no.1448950
  misc_feature: Bit score of 161.3 for HMM based on sequences of FIGURE 11.
  misc_feature (12)..(183): Pfam Name: HSF_DNA-bind Pfam Description: HSF-type DNA-binding
  misc_feature: Functional Homolog Of Ceres LOCUS ID no. At2g26150 at SEQ ID NO. 364
MDESQGSPNSLPPFLAKTYEMVDDPSTDPIVSWSQSNKSFTVWDPPEFARDLLPRFFKHNNFSSFIRQLNTYGFRKIDPEQWEFANEDFIRGQPFLMKNIHRRKPVHSHSLQNLQGQGSNLLTDSERQSMKDDIERLKRDKEALILELQMQEQERKGFEMQIEGLKEKLQQMERRQQTMVSFVTRVMPKPGLALNLMPQLEGHDRKRRLPRIGCLHSEASSNEDNQTVTSQALSRENADGNSFALLNMEQFDQLESSLTFWENMVNDVVQTHSHNTKTIEMDESTSGAESPAISCAQLIFDFRPKTPGIDMNSEPSIAVVPEPVSPKEQPAGTAPAVATGVNDVFWEQFLTENPGSTDTQEVQSERKDSDGRKNEIKPGDPRKFWWDMRNVNNLTEQMGHLTPAERT

SEQ ID NO: 384 - DNA, 1854 bp, Triticum aestivum
  misc_feature: Ceres CLONE ID no.771500
  misc_feature: Encodes the peptide sequence at SEQ ID NO 385
gcaccgcccattccggccatccgccagcgcgcggcgcatggaccacacgcacaccggcaccaacaccacgcccgccgcagtcatcgcctccgcctccatggacgccgcgctgctactcgagcccaagctcgagatgatgctgcagcagcagccctcgcctgcgggccactacgccgcgctggaccatcacctggtcccgccgccgcccgcgctggtggtgccctgcgagccgccgcggcccctcgaggcgctgctgcaggggccgcagctgccgccgttcctgtccaagacgtacaacctcgtcagcgagccgcagctggacggggtcatctcctggggccccgccggcaacagcttcgtcgtgtggaacccttccaccttcgcccgtgacgtgctcccgcacaacttcaagcacaacaacttctccagcttcgtcaggcagctcaacacctatggttttcgcaaggttcatgctgatagatgggagttcgctcacgagggatttctgcggggcagcaaacatctgttgaagacgatagtcaggcgccggtcctcgccgacgcaacaaagcagccttcagcctggttcatctatcttcaggaagatacagtctagctcttctggtgagtccactctggaccctgaactgcactccctgagaagagagaaaaacgcgctgctacaggaggtggccaggctgaaggaggagcacaatcagacgatcgagcatatgaacgcactgaaccagaggctggagaccgcggaggaccggcagaagcaggtggtctccttcttggccaagctccttcggaacccggatttcctgaggcagctcaagatgcacagggagagaagggacgggatcgattccgccagagtgaagaggaaattcctgaagcatgtgctgcatggcagcagaaactcgggcgactccaactcgccgcgcaccgcagagagtacatgttcccctgcacatccagttgcgcacgacgccattgcagacctacagagttttctcctggaagacacggaccttagtgatggcatgctgccgggtaactttgggctggacggagtcgaagcatcagacgacatcggggctttggttcaggtatttgaccagcaagatctcggaaccggggccgagctgcttggaattcctccagttcctggtgctgctcattgtcaagaccccacgtttggcaggtccaaggggaagaatgtcatgtgtccaggaggaacggatggcacatcgtctcaagccgactgcctcgtgccattaccgggcaacgtgggcaaactgatggatgcggatggtgagcaaatttggggcgccaatactttttttcagagttcttgcagcggcaccagtcaacaaacctatgttagtgatccctatctaatggagattcccgacaagcctgagagattctgggaactcgattttgatgcactggatgatggagatctgcacctggacaagtgtgttatcggcgaccctgctcttgagcaacacagaggaaacatgaagccatagatcaattgcgaagcgggggagttgtaggtctgatgctcgatccacctatcttaataaccatacttagctgtgagaagtgccatagttatttgatatttaggaggctagtgaactcctggatgtgctcactatggcactaagaattagtagtagtggtggtactagtactagcggtttgtttttgttttccattcattcaccctactgtttttgaatggaaaatattatcatgtcatttgctttgtttttgttttccattcattcaccctaccctttttgaatggaaaaatatcattgtgtgaaaaaaaaaaaaaaaa

SEQ ID NO: 385 - protein, 499 aa, Triticum aestivum
  misc_feature: Ceres CLONE ID no.771500
  misc_feature: Bit score of 140.4 for HMM based on sequences of FIGURE 11.
  misc_feature (79)..(253): Pfam Name: HSF_DNA-bind Pfam Description: HSF-type DNA-binding
  misc_feature: Functional Homolog Of Ceres LOCUS ID no. At2g26150 at SEQ ID NO. 364
MDHTHTGTNTTPAAVIASASMDAALLLEPKLEMMLQQQPSPAGHYAALDHHLVPPPPALVVPCEPPRPLEALLQGPQLPPFLSKTYNLVSEPQLDGVISWGPAGNSFVVWNPSTFARDVLPHNFKHNNFSSFVRQLNTYGFRKVHADRWEFAHEGFLRGSKHLLKTIVRRRSSPTQQSSLQPGSSIFRKIQSSSSGESTLDPELHSLRREKNALLQEVARLKEEHNQTIEHMNALNQRLETAEDRQKQVVSFLAKLLRNPDFLRQLKMHRERRDGIDSARVKRKFLKHVLHGSRNSGDSNSPRTAESTCSPAHPVAHDAIADLQSFLLEDTDLSDGMLPGNFGLDGVEASDDIGALVQVFDQQDLGTGAELLGIPPVPGAAHCQDPTFGRSKGKNVMCPGGTDGTSSQADCLVPLPGNVGKLMDADGEQIWGANTFFQSSCSGTSQQTYVSDPYLMEIPDKPERFWELDFDALDDGDLHLDKCVIGDPALEQHRGNMKP

SEQ ID NO: 386 - DNA, 1572 bp, Populus balsamifera subsp. trichocarpa
  misc_feature: Ceres ANNOT ID no.1485096
  misc_feature: Encodes the peptide sequence at SEQ ID NO 387
atggattgtcaacagtcttctagtgcagggtcgatatttgttgaagatttaagcttccctgctgccgcaccttctcctttaatggacctggaggctttctcctatgtaagcccgacgacttcagctcatccagtatcatcatcggcgactgccaacgaggtggatgaggaagaggagatgccacgtcctcttgtgtgcttacaggagaatccagtaccgccttttctatcgaaaacatatgatctggtggatgatcggatgctggacccaataatttcgtggggttccattggggagagtttcgtggtgtgggaccccgaggagttcgccaggcttgttctccctcggaatttcaagcacaacaatttctccagttttgtccgacaactcaatacttatgtgggcagaaccagaataatagttagtgatgtaggattgttgtcttatgtaatatacaaggggttccgcaagattgatactgatcgatgggagtttgccaatgaatctttcagaagaggcgagaagcatctgttgaagaacattcataggcgcaaatcaacacagtcccagcaggttgggagccacacggggtctttaactgaagcagggaggtctggattggatagtgaggtagaaagattaaggaaggagcggagtgtgatgatgcaggaagttatagaactgcagaagcagcagtctgggactgttcacgatgtgcaatcagtaaatcagagacttcaggcagcagagcaaaggcagaagcagatggtttcgttcttggcaaagttgtttcagaatccagcattcttagcccgtctcaagcaaaagaagcaacagggagagattggttcatcaaggatgaagaggaagtttgttaagcaccagcaacaccaacatgccctacctgaatcatcaatggaagggcagattatgagatacatgcctgattggagaaacatcacattatcttctgtggtcccggatacaagtccagcctctattgatcaatctcctgattatctctcagaaggcatggtaggcctgggtcttggcagtgaagcaatgccattacctgaaattgttgcacctgatgaatttgccatctcagacgaattaggattgggacagggatttatcaaaacaccagagcaggttggagaagggcaatcaagcatgcaatttgaagatcccaagctcaaaggaaagattgatatgagcccgcaaaatgaggctggtcttgaatattttgtctcttttcctgaggatttggggatggagaaaagctttccagaattatcttcccctggcatggaaagaattgttaaacaagaggatgtatggagtttggcatttaacactagtgctggtatgtctagttctagcaatgttccatgggataattttttcggatatgatatgccagagttgggatcaacaggtggcttctcagatatctgggatataggttctggacaagcaggaggaggtttgagcatggataagtggctggctgatgaaagtcccgttgatgagtctgatagtcaagctggccagccaaaagatgataaataa

SEQ ID NO: 387 - protein, 523 aa, Populus balsamifera subsp. trichocarpa
  misc_feature: Ceres ANNOT ID no.1485096
  misc_feature: Bit score of 124.3 for HMM based on sequences of FIGURE 11.
  misc_feature (73)..(260): Pfam Name: HSF_DNA-bind Pfam Description: HSF-type DNA-binding
  misc_feature: Functional Homolog Of Ceres LOCUS ID no. At2g26150 at SEQ ID NO. 364
MDCQQSSSAGSIFVEDLSFPAAAPSPLMDLEAFSYVSPTTSAHPVSSSATANEVDEEEEMPRPLVCLQENPVPPFLSKTYDLVDDRMLDPIISWGSIGESFVVWDPEEFARLVLPRNFKHNNFSSFVRQLNTYVGRTRIIVSDVGLLSYVIYKGFRKIDTDRWEFANESFRRGEKHLLKNIHRRKSTQSQQVGSHTGSLTEAGRSGLDSEVERLRKERSVMMQEVIELQKQQSGTVHDVQSVNQRLQAAEQRQKQMVSFLAKLFQNPAFLARLKQKKQQGEIGSSRMKRKFVKHQQHQHALPESSMEGQIMRYMPDWRNITLSSVVPDTSPASIDQSPDYLSEGMVGLGLGSEAMPLPEIVAPDEFAISDELGLGQGFIKTPEQVGEGQSSMQFEDPKLKGKIDMSPQNEAGLEYFVSFPEDLGMEKSFPELSSPGMERIVKQEDVWSLAFNTSAGMSSSSNVPWDNFFGYDMPELGSTGGFSDIWDIGSGQAGGGLSMDKWLADESPVDESDSQAGQPKDDK

SEQ ID NO: 388 - DNA, 1655 bp, Glycine max
  misc_feature: Ceres CLONE ID no.1646104
  misc_feature: Encodes the peptide sequence at SEQ ID NO 389
attgagttcccctttgccaagtcttgtcttgtgtttgttgcagttgcggttgcggttgcgattgcgatggtgaaatcgaacgagaacggttctggttccgtttcggtgcctcctttcctgaaaaaatgttacgatatggtggaagaccgcaacactgattctatcatccgttggagcgatggcggtgacagctttgtcatctccgacatcactcaattctccgtcacgctccttcccacctatttcaaacacaacaatttctccagtttcatcagacaactcaatatctatggtttcaggaaaattgatacggattgctgggaatttgccaatgagaactttgttagaggtcaaaagcatttgttgaagaatatacgtagaaggaaacatccacacagtgcagatcagcaaaaagcattgccacagcaagacaattgtgatgaaccatcacaagaagcaccgtatcatggcctttggaaagaagttgagaatctaaaacttgataaaaattcgctcacgcaagaattggtcaaacttaggcaacaccaggaatctgctgagaataagttgctgctcctgagtgatcgccttcaaggaatggaaaagcatcagcagcagatgttatcatttttagtcatggttgtgcaaagccctgggttcatggttcagcttcttcatcctaaggaaaataattggcatttggctgaatcatggaatatattggatcaagataaacaagatgacaagccagttgcttctgatgggatgataataaagtataaaccacctgtaggtgaaaaactaaagcctgtagttcctctgtctcctggtttcgaaaagcaaacagaacccgagctttctgcagaagggctaaaagacttgtgcgtcagttctgaattcttgaaagtgcttctggatgaaaaattatctccattagaaaatcattctccatttctcctaccagatttacctgatgatggttcatgggaacagctttttctaggtagtcctttcatgggaaacattcaagattctaataaagaaagtgaggggcacaccaatggtggaatggagatggaaccaacaatatctgagactccaaatgaaaattctcgaacttttgaatcgatgattgtagagatggagaaaactcgagaatgagttggagttgtatgcacatggtgggctgtcttcttggaatccatcagatatttttcagctgggctgtctcatactgagctaatggagctttagtttctgaaactaacaatatatagggaaggaagtaataatgtccatcagatatttttcagctgggctgtcttcacagattacttcacactataattatattatagtattaagtcgcaattattttctctcccatcttccttcagcagttgttagatcctcttctagaatccatattttggcttcctgatacatggtgtcggagatcaggagttgtatggtagtgcacgagtgcggcgacctatatatatagcggatcaattatttcttttatggaaaattgtaagggaaaacggcaactttattttttgtgccacattaaacagtggcacttgctttcatatatattataaaatttcacgaaattcatgcttctcttgcaagaaaaaaaaaaaaaaaaaaaa

SEQ ID NO: 389 - protein, 364 aa, Glycine max
  misc_feature: Ceres CLONE ID no.1646104
  misc_feature: Bit score of 132.8 for HMM based on sequences of FIGURE 11.
  misc_feature (15)..(189): Pfam Name: HSF_DNA-bind Pfam Description: HSF-type DNA-binding
  misc_feature: Functional Homolog Of Ceres LOCUS ID no. At2g26150 at SEQ ID NO. 364
MVKSNENGSGSVSVPPFLKKCYDMVEDRNTDSIIRWSDGGDSFVISDITQFSVTLLPTYFKHNNFSSFIRQLNIYGFRKIDTDCWEFANENFVRGQKHLLKNIRRRKHPHSADQQKALPQQDNCDEPSQEAPYHGLWKEVENLKLDKNSLTQELVKLRQHQESAENKLLLLSDRLQGMEKHQQQMLSFLVMVVQSPGFMVQLLHPKENNWHLAESWNILDQDKQDDKPVASDGMIIKYKPPVGEKLKPVVPLSPGFEKQTEPELSAEGLKDLCVSSEFLKVLLDEKLSPLENHSPFLLPDLPDDGSWEQLFLGSPFMGNIQDSNKESEGHTNGGMEMEPTISETPNENSRTFESMIVEMEKTRE

SEQ ID NO: 390 - protein, 337 aa, Beta vulgaris
  misc_feature: Public GI ID no.111184724
  misc_feature: Bit score of 84.4 for HMM based on sequences of FIGURE 11.
  misc_feature (47)..(175): Pfam Name: HSF_DNA-bind Pfam Description: HSF-type DNA-binding
  misc_feature: Functional Homolog Of Ceres LOCUS ID no. At2g26150 at SEQ ID NO. 364
MEPKTELSLGGGIRSSGFVTTKMEDTEEKEVIELPKPLENLHEIGPPPFLSKTFEIVEDPETDTIVSWGVTFDSFIVWDISKFSDLLSKYFKHRNFNSFVRQLNTYGFRKVHLDRLEYANSGFQKGKKHLLKTIKRRNHGANNNTALLLQRETAIENIKKEQEALKLEILDLKKEQQNSNTCLAALGERVKFVEWKQREFIMLIAKAMKRTSSFQQVLQNYRHNKVLSSGEFYKKRRLASTSDSLALADQFLANSPTTTQNKEDVSTFQYEANSFVGSAGQKSNLASETSSPDLSSGSYIMWEKLMADDVICKDDREEKYVHELENLITKPSSLICK

SEQ ID NO: 391 - DNA, 1197 bp, Glycine max
  misc_feature: Ceres CLONE ID no.1362475
  misc_feature: Encodes the peptide sequence at SEQ ID NO 392
aaaaaaaaaataacctcacacactttctctctctctctttctctttctcactcactctcactctctgtcacggacagacagagaaaaactcagacacccacgttcacacttccctcacaccatcccttactgttccttcttcttcttcttccttttttttttttctcttaatggaatgatggaacacaacatcatcgttaacaacaacaacgtgatcgcaccgtttgtcataaaaacctataacatggtgaacgatcccaccaccgataaactcatcatgtggggcccagccaacaacagcttcatcgtcctcgaccccctcgacttctctcactccctcctccctgctttcttcaagcacaacaacttctccagcttcgttcgacaactcaacacttatggtttcagaaaggtggatccggatcggtgggaattcgcaaatgagtggttcctgcgaggacagaagcacttgttgagaaacatcgcgcggaggaagcacggtggagctgggaggagcaatttcaatttgcattcgcatcatcatccgttgaaggtggaggaattggacgacgaagccatggtgatggagatagcgaggttgaaggaggagcaaaaagcgttggaggaagagcttcaaggaatgaacaagaggttagagacaacagaaaaacgaccacaacaaatgatggcttttctgtccaaggttgtcgaggacccgcaggttctttctcggattctccgagaaagagaaaagaaacacctgggcgagaaaaagcgccgcctaattccgccgccaacaacgacggcagcgacgacgtcgtcgtcgtcgtcctccggcatcaagacggagttcgaagaagacgaaggtaattataatatcatgtcttcgtcgccggagacagggttggaaatcgataataataatatttgttcgcctctggcggcggggtattggggggaacagggttgtcatgggtacaatcgtggcgccgtgacggcgccgttgacggtggtggcgccggcggttccgacgatgggaggagggtatttggggcgtggggttttttttggggaaatggcggcggaggggaatgcggtgccgccttatccgttttcgttgttggaaggtggcttttagatttatttgttttaggttatgaaatgaatgaattattactgccaaaaaaaaaaaaaaaa

SEQ ID NO: 392 - protein, 320 aa, Glycine max
  misc_feature: Ceres CLONE ID no.1362475
  misc_feature: Bit score of 93.2 for HMM based on sequences of FIGURE 11.
  misc_feature (15)..(107): Pfam Name: HSF_DNA-bind Pfam Description: HSF-type DNA-binding
  misc_feature: Functional Homolog Of Ceres LOCUS ID no. At2g26150 at SEQ ID NO. 364
MMEHNIIVNNNNVIAPFVIKTYNMVNDPTTDKLIMWGPANNSFIVLDPLDFSHSLLPAFFKHNNFSSFVRQLNTYGFRKVDPDRWEFANEWFLRGQKHLLRNIARRKHGGAGRSNFNLHSHHHPLKVEELDDEAMVMEIARLKEEQKALEEELQGMNKRLETTEKRPQQMMAFLSKVVEDPQVLSRILREREKKHLGEKKRRLIPPPTTTAATTSSSSSSGIKTEFEEDEGNYNIMSSSPETGLEIDNNNICSPLAAGYWGEQGCHGYNRGAVTAPLTVVAPAVPTMGGGYLGRGVFFGEMAAEGNAVPPYPFSLLEGGF

SEQ ID NO: 393 - DNA, 1366 bp, Glycine max
  misc_feature: Ceres CLONE ID no.597906
  misc_feature: Encodes the peptide sequence at SEQ ID NO 394
aaaaaaattttaacctcaccctctttacccacaccctctctctctctctctctgtcacgcacagagaaaaactcagacacccacgttcacacttcgcacacaccatctctcactgttctttcttcttcctctttttcttttttttttttcttttctcttaatggaatgatggaacacaacatcatcgtcaacaacaacgtgatcgcaccgtttgtcataaaaacctacaatatggtgaacgatcccaccaccgataaactcatcacgtggggcccagccaacaacagcttcatcgtcctcgatcccctcgacttctcccactccctcctccctactttcttcaagcacaacaacttctccagcttcgttcgccaactcaacacctatggtttcagaaaggtggatccggatcggtgggagttcgcgaacgagtggttcctgcgaggacaaaagcacttattgaggaacatcgtgcggaagaagcacggtggagctgggaggaccaattccaattcgcattattcgcatcccttgaagctggaggagttggacgacgaggctatggtgatggagatagcgaggttgaaggaggagcaaaaagcgttggaggaagagcttcatgaaatgaacaagaggttagagacaacagaaaaacgaccacaacaaatgatggcttttctgtgtaaggttgtcgaggacccgcagattctttctcggattctccgagaaagagaaaagaaacacctgggagagaaaaagcgacgcctcattccgcctccgccgccgacggcagcgacgtcgtcgtcgtcgtcctccggcatcaagacagagttcgaagaagacgaaggtaattataatatcaagtcttcgtcgccggagacagggttggaaatcgacaacaatagtaacaatatttgttcgccgccgccgctggggtgttggggtgaacagggttgttatgggtacaattgcgcctccgtgccggcacctttgacggtggtagcgccggcgtttccgacgatgggaggagggtatttgaggcgtggggggttttggggggaaatggcggcggaggggaatgcggtgccgccttatccgttttcgttgttggaagggggcttttagatttagttttaggttatgaaatgaatgaattattactgccacaaaatttcatcttggattttctgtcgtattgaaagttctatccttttttgtgcgttgattctgtgtaaagaaaaaaggttgggaaaaagagtaaaaaggtagtgggaaaattgttagatatttatagttgtgttcggtttcaggttttttttttcataaatattgtttttaaataaatgctttgcggatggtgtagacc

SEQ ID NO: 394 - protein, 319 aa, Glycine max
  misc_feature: Ceres CLONE ID no.597906
  misc_feature: Bit score of 77.5 for HMM based on sequences of FIGURE 11.
  misc_feature (14)..(106): Pfam Name: HSF_DNA-bind Pfam Description: HSF-type DNA-binding
  misc_feature: Functional Homolog Of Ceres LOCUS ID no. At2g26150 at SEQ ID NO. 364
MMEHNIIVNNNVIAPFVIKTYNMVNDPTTDKLITWGPANNSFIVLDPLDFSHSLLPTFFKHNNFSSFVRQLNTYGFRKVDPDRWEFANEWFLRGQKHLLRNIVRKKHGGAGRTNSNSHYSHPLKLEELDDEAMVMEIARLKEEQKALEEELHEMNKRLETTEKRPQQMMAFLCKVVEDPQILSRILREREKKHLGEKKRRLIPPPPPTAATSSSSSSGIKTEFEEDEGNYNIKSSSPETGLEIDNNSNNICSPPPLGCWGEQGCYGYNCASVPAPLTVVAPAFPTMGGGYLRRGGFWGEMAAEGNAVPPYPFSLLEGGF

SEQ ID NO: 395 - DNA, 1627 bp, Triticum aestivum
  misc_feature: Ceres CLONE ID no.615781
  misc_feature: Encodes the peptide sequence at SEQ ID NO 396
aagaaattctcgccccccaacccaacccccaaccaaccaaccaaacccaaccgaagaagccgagccgaaccccactccgccgatcagccgctatgcgctgaggccgaatcgccgcagcccgaggaggagaagggggtggaggggatggaggggagtggcgggtccgcgtcgctgccgccgttcctcaccaagacgtacgagatggtggacgagccggccacggacgcggtggtggcgtggacgccgtccggcaccagcttcgtcgtcctcagccaggccgacttctgccgggatcttctccccaagtacttcaagcacaacaacttctccagcttcgtgcgccagctcaacacctacggctttaggaaggtagatccagaacaatgggaatttgcaaatgaagaattcctacgagatcagcggcatcggttgaaaaatatccatagacgcaagccaatattcagccattcatcacacactcagggtgccggaccattagctgatagtgaaaggagggactatgaggaggaaattgagaggctcaagtgtgataatgcatcactaaatttacagcttgagaggaagaaaactgatatggagagtaaaatgaaggctttggaagacaaactatttgctattgaggatcagcagaaaaatcttatatcttatgtcagagaaattgtgaatgcacctggatttctttctagcttcgtagaacaatctgatcatcatggaaagaagaggagactgcctaaaccaatttcattccatgatgatgcttgtactcaggggaaccagattatgcattgtgacttggtcaactcaccagctcatgaactttttaggtcatcatttgacaaaatggaatcatccttaaattccttggagaatttcttcaaagaagcgagtgaggcatttggtaatgatgtttcatctgatggtgatgtcccaggtcattcttcagctgttgttcttacagagctccattcaactggggagagtgacccccacgcgcaatcacctccgtccatgatgcatacttgttcagctggtgtaggagattcacactcttctcgtgatatagcagagtccgccagctgtccagagagtcctctgcttccccaagctcattctcgtgcagattcacgagctaaggtctccgagatagatgtcaatttagaacctgctgttacagaaaatggtccatcgagagatcaacaacccacccaagaccttcctgctgacgcaaatgatggattttggcagcagtttcttaccgagcagcctgggttgacccatgcacaccaggaggcccaatcagaacggcgagacagagaagcaaatcaaacaacagcaggagaccgcggaagtttttggttggacaagagcagcatcgaacagatgacaaaaaaactggggcatctcacctcagctgagaaaacctgagtatgtatttctcatttcttgtagctgaaaatgaccagtacagaaacattaggaccatggcacctcccagtgaggtatgcctgctaacatttactttgcagtgtatcagaattgtgtgtgttagattgttgcagactatgtgctatatactaccttgatatacgttcatactttgttagcg

SEQ ID NO: 396 - protein, 433 aa, Triticum aestivum
  misc_feature: Ceres CLONE ID no.615781
  misc_feature: Bit score of 92.5 for HMM based on sequences of FIGURE 11.
  misc_feature (11)..(104): Pfam Name: HSF_DNA-bind Pfam Description: HSF-type DNA-binding
  misc_feature: Functional Homolog Of Ceres LOCUS ID no. At2g26150 at SEQ ID NO. 364
MEGSGGSASLPPFLTKTYEMVDEPATDAVVAWTPSGTSFVVLSQADFCRDLLPKYFKHNNFSSFVRQLNTYGFRKVDPEQWEFANEEFLRDQRHRLKNIHRRKPIFSHSSHTQGAGPLADSERRDYEEEIERLKCDNASLNLQLERKKTDMESKMKALEDKLFAIEDQQKNLISYVREIVNAPGFLSSFVEQSDHHGKKRRLPKPISFHDDACTQGNQIMHCDLVNSPAHELFRSSFDKMESSLNSLENFFKEASEAFGNDVSSDGDVPGHSSAVVLTELHSTGESDPHAQSPPSMMHTCSAGVGDSHSSRDIAESASCPESPLLPQAHSRADSRAKVSEIDVNLEPAVTENGPSRDQQPTQDLPADANDGFWQQFLTEQPGLTHAHQEAQSERRDREANQTTAGDRGSFWLDKSSIEQMTKKLGHLTSAEKT

SEQ ID NO: 397 - DNA, 1454 bp, Glycine max
  misc_feature: Ceres CLONE ID no.538713
  misc_feature: Encodes the peptide sequence at SEQ ID NO 398
gaagcattctcaaccatgaactcgtctccgtcttcttcccagttaccttcatcaagcgctgattttgacaagtttaatagtttgccgcgcttccgcccacttgaatgcttgcaagggaacccggttccggcgttcctgtccaagactttcgaactcgtcgacgatccctcgctggatccgatcatatcctggggctccaccggtgttagcttcgtggtgtgggatcctaccctgtttgcaagacacgtcttgccgaggaatttcaagcataacaatttctccagttttgttcgccagttaaatacctatggattccgcaagattgacactgaaaaatgggagtttttcaatgaagctttccagcgaggaaagagacatcttctgaagaacatccggaggcgcgggccacctcagtcccatcaggttggtggcaatattgtgccttattccgatgcagataaggccgggcttgaatttgagctagaaagtctaaggaaagaaaggagtgtgctaatgcaagaggtggttgagttgcaacaacagcagagaacgacacttcaacgtgcgagacaggtgaatcagaggcttcaatctgcagaactgatacagaaacaaatggtttctttcttggcaaggttatttgaaaagccagcatttttaaccagtcttcagcatgcgaaggaacaaagagatttagggtgtcctaaagttagaaggagatttatcaaccagcaccaaggccaaacagaaatatcagattttttaaatgaagggcagattgtaagataccaacctgattggagaaatgtaaccacctcttctgaaatacaagaaatgtatccagtttcacttgaagagtctccaaattacctttctcaggctttggcaaaagaatttagtgaaggcacagagaatctgatatcagatgaagtcatgtcaattgctgacaccatggggtttaagtcatcaagctttggacttgatggtaaccttttcaaagggaaaaatgtcatgagctcaaacgaaggtcttcttgcagaggagtttgtgtctttcccagaggatttgaccaaggagacaggatttccagagttttcacctcttggaactgaaggcatcatcaagcgagaagataaacggaacaccaactttgatgttagtggtgctgattcaagctctgggaatgaacagtggggaaatcctatcaattatgaagtgccagaatttgtagtcacaagtggtatgacagacatgtgggatattaactatttaactcacagcaagtgacagaaagtatcccaatacatgattcaacccttgatgaaaaagaaagataatataaataagaatatggatgcatcgggcttcatctgcttctgcacatattgtgctgtgtttagttcccaggggtccaattattaaataaattgatttgtaactggtgctcattcact

SEQ ID NO: 398 - protein, 423 aa, Glycine max
  misc_feature: Ceres CLONE ID no.538713
  misc_feature: Bit score of 110.4 for HMM based on sequences of FIGURE 11.
  misc_feature (38)..(205): Pfam Name: HSF_DNA-bind Pfam Description: HSF-type DNA-binding
  misc_feature: Functional Homolog Of Ceres LOCUS ID no. At2g26150 at SEQ ID NO. 364
MNSSPSSSQLPSSSADFDKFNSLPRFRPLECLQGNPVPAFLSKTFELVDDPSLDPIISWGSTGVSFVVWDPTLFARHVLPRNFKHNNFSSFVRQLNTYGFRKIDTEKWEFFNEAFQRGKRHLLKNIRRRGPPQSHQVGGNIVPYSDADKAGLEFELESLRKERSVLMQEVVELQQQQRTTLQRARQVNQRLQSAELIQKQMVSFLARLFEKPAFLTSLQHAKEQRDLGCPKVRRRFINQHQGQTEISDFLNEGQIVRYQPDWRNVTTSSEIQEMYPVSLEESPNYLSQALAKEFSEGTENLISDEVMSIADTMGFKSSSFGLDGNLFKGKNVMSSNEGLLAEEFVSFPEDLTKETGFPEFSPLGTEGIIKREDKRNTNFDVSGADSSSGNEQWGNPINYEVPEFVVTSGMTDMWDINYLTHSK

SEQ ID NO: 399 - DNA, 1256 bp, Gossypium hirsutum
  misc_feature: Ceres CLONE ID no.1794141
  misc_feature: Encodes the peptide sequence at SEQ ID NO 400
agctcagaaagaaggaaaccttttctccagcagagaaacaaagggtcagtttctatctttttgatgaaatggaggctgacagtaatcctaaaatagttgcgccattcgttgcgaaaacttaccagatggttaatgatcccatgactgacggtttgatcacatggggtaaagctaataacagtttcatagtcatcgaccctttagatttctctcaaaggatcttgcctgtttacttcaagcatagcaatttttctagcttcgttcgccagcttaatacttatggtttcaagaaggtggatcccgataagtgggaatttgcgaatgagtggttcctgcgagggcaaaagcatttgttgaagaacatagcgagaagaaagcataataaaaatccattcatgcaactgaaagctgaggacttagaggacgaagaaatagtgatggaaatagcgagactaaaagaggagcaaaagtcgttggaagaagagctgcaagggatgaacaagcgtttagaagccactgagagacgcccgcaacaaatgatggagtttctttacaaagtcgttgaagaccctgacctccttcctcgtatgatgctcgaaaaggaacggacaagacaacttaacgccgacaagaagcgacggttgacgatgatgccctccaactcatcatcttcaagcctggccgtttctaataattcagtcaagtccgaagaggaagaagatggacatccaggagtaatttcgtccccagaaactggattcgatatggaaaacaacttttatcgctcaagttatcaatcatcgccgtcgcctgatcaggactcaaaagaattgttggggcaaaatagactacatgaggggcaactcatgaactatggttgcgccgcagtaacaactcaattgccggcggtgatggtggctccgacggtgattgggaacggcatggcggtgtcttcgtcggggacgactagtgtagcagggtatggtgataggagcgggcaactgggttatttcggagaaatggcggcgccttggatggaggcgcgtccacgaccgccttatccattttcgctattagagggtggcttttagttggttgcgtcacatgatatatcttggattctatcttactacggattttttttttaaagttttagattttgcaaatttcatttcatatatcggcttttgtaaataaaatgatttaattataaggttaacaaaaatcttattttataaaaaaaaaaaaaaaaaaaa

SEQ ID NO: 400 - protein, 340 aa, Gossypium hirsutum
  misc_feature: Ceres CLONE ID no.1794141
  misc_feature: Bit score of 98.3 for HMM based on sequences of FIGURE 11.
  misc_feature (11)..(107): Pfam Name: HSF_DNA-bind Pfam Description: HSF-type DNA-binding
  misc_feature: Functional Homolog Of Ceres LOCUS ID no. At2g26150 at SEQ ID NO. 364
MEADSNPKIVAPFVAKTYQMVNDPMTDGLITWGKANNSFIVIDPLDFSQRILPVYFKHSNFSSFVRQLNTYGFKKVDPDKWEFANEWFLRGQKHLLKNIARRKHNKNPFMQLKAEDLEDEEIVMEIARLKEEQKSLEEELQGMNKRLEATERRPQQMMEFLYKVVEDPDLLPRMMLEKERTRQLNADKKRRLTMMPSNSSSSSLAVSNNSVKSEEEEDGHPGVISSPETGFDMENNFYRSSYQSSPSPDQDSKELLGQNRLHEGQLMNYGCAAVTTQLPAVMVAPTVIGNGMAVSSSGTTSVAGYGDRSGQLGYFGEMAAPWMEARPRPPYPFSLLEGGF

SEQ ID NO: 401 - protein, 408 aa, Nicotiana tabacum
  misc_feature: Public GI ID no.5821138
  misc_feature: Bit score of 118.7 for HMM based on sequences of FIGURE 11.
  misc_feature (12)..(183): Pfam Name: HSF_DNA-bind Pfam Description: HSF-type DNA-binding
  misc_feature: Functional Homolog Of Ceres LOCUS ID no. At2g26150 at SEQ ID NO. 364
MDEATCSTNALPPFLTKTYEMVDDPSSDAIVSWSSSNKSFVVWNPPDFARDLLPRYFKHNNFSSFIRQLNTYGFRKVDPEKWEFANEDNFFRGQPHLLKNIHRRKPVHSHSAQNLHGLSSPLTESERQGYKEDIQKLKHENESLHLDLQRHQQDRQGLELQMQVFTERVQHVEHRQKTMLSALARMLDKPVTDLSRMPQLQVNDRKRRLPGNSCLYNETDLEDTRAISSRALTWENMNPSSLLTINAELLNQLDSSLTFWENVLQDVDQAWIQQNCSLELDESTSCADSPAISYTQLNVDVGPKASDIDMNSEPNANTNPEVAAPEDQAAVAGTTTNVPTGVNDIFWEQFLTENPGSVDASEVQSERKDIGNKKNESKPVDSGKFWWNMKSVNSLAEQLGHLTPAEKT

SEQ ID NO: 402 - protein, 308 aa, Zea mays
  misc_feature: Public GI ID no.886742
  misc_feature: Bit score of 62.0 for HMM based on sequences of FIGURE 11.
  misc_feature (8)..(101): Pfam Name: HSF_DNA-bind Pfam Description: HSF-type DNA-binding
  misc_feature: Functional Homolog Of Ceres LOCUS ID no. At2g26150 at SEQ ID NO. 364
MEGASSLPPFLSKTYEMVDDPATDAVVAWTPLGTSFVVANQAEFWRDLLPKYFKHNNFSSFVRQLNTYGFKKIDPEQWEFANDDFIRGQQHRLKNIHRRKPIFSHSSHTQGSGPLPDTERRDYEEEIERLKCDNAALTSELEKNAQKKLVTEKRMQDLEDKLIFLEDRQKNLMAYVRDIVQAPGSFSSFVQQPDHHGKKRRLPVPISLYQDSNAKGNQVVHGSFITNPPACRESFDKTESSLNSLENFLREASEAFNISYDDGLPGLHLLSLSQSSIRPEKVIPMCHHLSQECIHLRLVREIRSLPAI

SEQ ID NO: 403 - DNA, 1511 bp, Panicum virgatum
  misc_feature: Ceres CLONE ID no.1814498
  misc_feature: Encodes the peptide sequence at SEQ ID NO 404
agcgagagcccccggccaccaaccaaccaaaccccaagcaagcagccgcgagcccaaatccgccggatcacaccgggcatgcgccgagcccccgccgccgccgccgcagcagcagcagcctgagtaggaggacgaggggggaggctggtctcgggtggggatggaggcgggcggcgggggcgcgtcctcgttgccgccgttcctgagcaagacgtacgagatggtggacgacccggccacggacgccgtggtggcgtggacgccgccggggaccagtttcgtcgtcgccaaccaggccgagttctgcagggatctgctccccaagtacttcaagcacaacaacttctccagcttcgtgcggcagctcaacacctacggcttcagaaaaattgatcctgagcaatgggagtttgcaaatgaggatttcattaggggacaacggcaccgactgaaaaatatacataggcgcaaacccatattcagtcactcatcacacaatcaggtttctgcaccgttagcagatcatgaaaggcgggaatatgaagaggaaatcgagaagctcaagtgcgagaatgcagatctcatctcagagcttgaaaagaatgcggaaaagaaacttgatatggagagacgaatgcaggagctggataataagttgatatctttggaggatcggcaaaagaatctgatagcttatgtcagagatattgtacgggcaccaggatttcgctctagctttgtgcagcaaactgatcatcacggaaagaaaaggagactactaatacctgcttctctccaccaagatgcaaataccgaggggaatcagattgtgcatgggggcttaacgaacccaccagtttacagagaatcatttgacaaaatggagtcttccttgaactcattggagaatttctttcgagaagcaagtgaagcatttgatatttcatatgatgatggtgtcccgggaccttcatctgccattgttatcacagagctccattcatctggagaaagtgatcctgttgtaccatcacctccatcaaggatgcatacctcttcagctggtgcaggagattcactctcaaggatgcatacctcttcagctggtgcaggagattcgctctcttctcatgacgtatcagggtcaactagctgcgcagaaagtcctcccctccctcaaatgcagtcctgtacagattcacgagctaaggtgtctgagatcgatgttaatcttgagcctgctattacagaaactggtccatcaagggatcaacctgccgaggaccatccaagtttagcacctgcaaatgatggcttttgggagcaatttcttactgagcagcctggttccaatgcacatcagggggtccaatcagaaaggcgagatggagacagtaaagatgatcggacgagaacaggagatcaggaaaacttatggggggggaaagaagaatgtggaacagatgacagaaaagctgggggcatcycaccycggcggagaaaaccaaacg

SEQ ID NO: 404 - protein, 450 aa, Panicum virgatum
  misc_feature: Ceres CLONE ID no.1814498
  misc_feature: Bit score of 59.2 for HMM based on sequences of FIGURE 11.
  misc_feature (12)..(105): Pfam Name: HSF_DNA-bind Pfam Description: HSF-type DNA-binding
  misc_feature: Functional Homolog Of Ceres LOCUS ID no. At2g26150 at SEQ ID NO. 364
  misc_feature (443)..(443): Xaa is any aa, unknown, or other
  misc_feature (444)..(444): Xaa is any aa, unknown, or other
MEAGGGGASSLPPFLSKTYEMVDDPATDAVVAWTPPGTSFVVANQAEFCRDLLPKYFKHNNFSSFVRQLNTYGFRKIDPEQWEFANEDFIRGQRHRLKNIHRRKPIFSHSSHNQVSAPLADHERREYEEEIEKLKCENADLISELEKNAEKKLDMERRMQELDNKLISLEDRQKNLIAYVRDIVRAPGFRSSFVQQTDHHGKKRRLLIPASLHQDANTEGNQIVHGGLTNPPVYRESFDKMESSLNSLENFFREASEAFDISYDDGVPGPSSAIVITELHSSGESDPVVPSPPSRMHTSSAGAGDSLSRMHTSSAGAGDSLSSHDVSGSTSCAESPPLPQMQSCTDSRAKVSEIDVNLEPAITETGPSRDQPAEDHPSLAPANDGFWEQFLTEQPGSNAHQGVQSERRDGDSKDDRTRTGDQENLWGGKEECGTDDRKAGGIXXRRRKPN

SEQ ID NO: 405 - protein, 402 aa, Medicago sativa
  misc_feature: Public GI ID no.7158882
  misc_feature: Bit score of 70.2 for HMM based on sequences of FIGURE 11.
  misc_feature (11)..(120): Pfam Name: HSF_DNA-bind Pfam Description: HSF-type DNA-binding
  misc_feature: Functional Homolog Of Ceres LOCUS ID no. At2g26150 at SEQ ID NO. 364
MDEAGSSSSLPPFLAKTYEMVDDRSSDPIVSWSASNKSFVVWNPPEFARVLLSEILKHNNFSSFIRQLNTYGFRKVDPEQWEFANDDFIRGQPHLMKNIHRRKPVHSHSLHNLQAQASLTESERQSMIDEIEKLKQDREQLLVETKRYQHDWERHEIQMHCSKDQLEKLEHKQQKMLSSVSEALQKPMIAVNLLPLAEAMERKRRLPARSVCFNNEASVEDAMETSVALPRENSEDNFYFDVKHREIGSTSRHPWHFGKTLAHEVGDNFVHTHSNMDLDESTCCADRLSISCQQLDGEVRPKSPEIDMNVEPAAAALEAVAVKEQPARITTAATGVNDVFWEQFLTEDPGASEAQEVQSERKDNSSRKNEGKPSDHGRFWWNMRKSNNHPEQMGHVSQVEKI

SEQ ID NO: 406 - DNA, 1191 bp, Populus balsamifera subsp. trichocarpa
  misc_feature: Ceres ANNOT ID no.1455221
  misc_feature: Encodes the peptide sequence at SEQ ID NO 407
atggagggagttgtagtgaaagaagaggagacagtgacatgtactggaggtggagcttcttcatcttcatcatcctctagtttctctccgcatccaatggaggggttaaatgaagtgggcccacctccgttcttgacgaagacatatgaaatggtggaagacccttcaacggatacagtggtttcgtggagtggaggtcgcaatagcttcatagtttgggactctcataagttctctactactttgcttccgaaacacttcaaacacagtaacttctccagcttcattcgacagctcaacacttatggtttcaggaaggttgatcctgaccggtgggaatttgccaatgaagggtttttgggagggcagaagcatctattgaagaccatcaaacggaaaagacatctctcacagaccacacaacaacaaggtggaggagcttgcattgagttaggacaatttgaatttgaaggagagcttgaaaggttaaaaagagaccgaaacgtgttaatggcagagattgtaaggcttaggcagcaacaacagcagtcgagggaacacattgctgcgatggaggataggttacgaagcacagagagaaaacagcagcgggtgatgacattccttgctaaagctctcaacaacccatcctttatcgagcaatttgcacaaagggctgcacagaggagagaaataagaggtgttgaaattgggcgtaagaggagactcactgcaagcccaagtgttgaaaatttgcaagaagttgcatctgtggcattaggtagcagccaatttgttgattacatgaatcaggatttaccaactattgagaacgagatggagacgcttttctctgctgtcttggacaatgaatcaagcagtgatatcaaggacccaatagcaagttctatggacacagcaagtggtggtagcactttggatgctgttaatgagacaatttgggaggagttacttactgatgatttagtttccggggaacctaatgaagttgttgtgagtgatgaaccagaagttgatgtggaagttgaggatttggttgcgaaacctgtggactggagtgatgattttcaggaccttgtggatcaaatgggttatctcaggagggagtggtggaagttccaacacggccaacagatgttactctgctcttctgtttccttcttgaattag

SEQ ID NO: 407 - protein, 396 aa, Populus balsamifera subsp. trichocarpa
  misc_feature: Ceres ANNOT ID no.1455221
  misc_feature: Bit score of 1032.2 for HMM based on sequences of FIGURE 11.
  misc_feature (42)..(209): Pfam Name: HSF_DNA-bind Pfam Description: HSF-type DNA-binding
  misc_feature: Functional Homolog Of Ceres LOCUS ID no. At2g26150 at SEQ ID NO. 364
MEGVVVKEEETVTCTGGGASSSSSSSSFSPHPMEGLNEVGPPPFLTKTYEMVEDPSTDTVVSWSGGRNSFIVWDSHKFSTTLLPKHFKHSNFSSFIRQLNTYGFRKVDPDRWEFANEGFLGGQKHLLKTIKRKRHLSQTTQQQGGGACIELGQFEFEGELERLKRDRNVLMAEIVRLRQQQQQSREHIAAMEDRLRSTERKQQRVMTFLAKALNNPSFIEQFAQRAAQRREIRGVEIGRKRRLTASPSVENLQEVASVALGSSQFVDYMNQDLPTIENEMETLFSAVLDNESSSDIKDPIASSMDTASGGSTLDAVNETIWEELLTDDLVSGEPNEVVVSDEPEVDVEVEDLVAKPVDWSDDFQDLVDQMGYLRREWWKFQHGQQMLLCSSVSFLN

SEQ ID NO: 408 - protein, 351 aa, Lycopersicon peruvianum
  misc_feature: Public GI ID no.729774
  misc_feature: Bit score of 883.6 for HMM based on sequences of FIGURE 11.
  misc_feature (30)..(197): Pfam Name: HSF_DNA-bind Pfam Description: HSF-type DNA-binding
  misc_feature: Functional Homolog Of Ceres LOCUS ID no. At2g26150 at SEQ ID NO. 364
MEDVMKVKVEEDGIPTAVLPMEGLHDVGPPPFLSKTYEMVEDSSTDQVISWSTTRNSFIVWDSHKFSTTLLPRFFKHSNFSSFIRQLNTYGFRKVDPDRWEFANEGFLGGQKHLLKTIKRRRNVGQSMNQQGSGACIEIGYYGMEEELERLKRDKNVLMTEIVKLRQQQQSTRNQIIAMGEKIETQERKQVQMMSFLAKIFSNPTFLQQYLDKQVHRKDKQRIEVGQKRRLTMTPSVTGSDQPMNYSSSLQESEAELASIEMLFSAAMDNESSSNVRPDSVVTANGTDMEPVADDIWEELLSEDLISGDRAAEEVVVVEQPEFDVEVEDLVVKTPEWGEELQDLVDQLGFL

SEQ ID NO: 409 - DNA, 2073 bp, Zea mays
  misc_feature: Ceres CLONE ID no.1414288
  misc_feature: Encodes the peptide sequence at SEQ ID NO 410
gaacgtgctcttctcgcccgcccggtcttgtctctcctctccagaaccttccaacggcagagtgctcgccgcgtggtctagaaccttccacaagcctcgcgacgtgtctcgacgcgccggtacggcggtgggggtatttaggggtccggccaccggccaccgcccgcccttcccccgatttcaccgaccattttccccattttacagcggcgaatatctctcatctcccccgtcctctttgctgcaacacctcctacccacccgacagaaatatcctaagcgccgacccgaatacccgattcgctcctcgtccggtcgattcctgctcctaatcgctcgaatcgagtccttgccccgtgttccgtgccacaatctgggcgcttggctcccgcgagccggggttcttgggcctgggcggaggccatggacaagccggtggcgccgggcattatcaaggaggagctcctggagcagcagccgccgacgcaggacggtgtgggtggcggcggggatgcgccgcgcccgatggaggggctgcacgaggtgggtcccccgcctttcctcaccaagacgttcgaccttgtggaggacccggccaccgacgccgtcctctcctggagccgcgccggcaacagcttcatcgtctgggacccgcacgtcttcgcctacgggctgctcccgcgcctcttcaagcacagtaacttctccagcttcgtgcgccagctcaacacctatggcttcagaaaggttgatcctgacaggtgggagtttgcaaatgaaggtttcctcagaggtcaaaggcacctgctgaagatgataaagagaaggaagccaccatcagctgtggcaccattgcgacagcaacgtgcccctgcttcttgcctggaggttggtgagtttggatttgaggaggagattgataggctgaagcgtgacaagaacattttaatcacagaagtagtaaaactaaggcaggagcagcaaagtactaaagatcatgtgagagccatggaggaaaggctacgagtggctgaacagaagcaggtacagatgatggggttcttggcaagagcaatgcggaacccagagttcttccagcagttggcccagcagcaagacaagaggaaggagctcgaggataccatctcaaagaaaagaaggcggcccattgacaacacaccattctacagtgatggggaaagcgaacagcttgattcacagttgaaaatgttcgagtcaggtgttctcaatgggctcaatgaacctgagctggagaatttagcagtgaacattcaggagcttgggaagggaagcatagatgatgggaacttgactcaagttagtgaccagtcagagctgaacgacgacttctgggcagagcttttggtcgaagattttggagacaaggcaggacagccagagttggagggaagaactgaagacgtgaatgaccttgctcaacaactggggtatctgagttcttctagcccaaaatagagccagttcctaatggttgcccccacaatcactggtgctttccctaccctactgttgcagaccatcctgatcaaaccgccaggaatgatgatggatctggcagacaagttgactggtggtggagaggtgttcatactgaaggcgtgctgtggagaggtcactgccttgacgttgaaggcttagcgctgtactctgctgtgggagttacgtgtggggtgttggctaaatgtctcttccggcgtcttctggcaaaatgatctcgtggacggtgactggcaaagatgcctaggggccaacgtatacgtacacagctgttatcagatcttgttcaaagtcattgcgcggttttgacggtgctatgtatcgatcagggttctggccttctggggttgggttgtagaattgactggctgatctagtgttctccatgtatgactggtgtaaccttaaaacaccctcagcttgttgttgaactgtgacaagcatctcgtttttttgttgtactccattttcatcatcattgtacatcaaattgctgaattatgaacagatccctaatgaaaaaaaaaaaaaaaa

SEQ ID NO: 410 - protein, 357 aa, Zea mays
  misc_feature: Ceres CLONE ID no.1414288
  misc_feature: Bit score of 894.8 for HMM based on sequences of FIGURE 11.
  misc_feature (44)..(214): Pfam Name: HSF_DNA-bind Pfam Description: HSF-type DNA-binding
  misc_feature: Functional Homolog Of Ceres LOCUS ID no. At2g26150 at SEQ ID NO. 364
MDKPVAPGIIKEELLEQQPPTQDGVGGGGDAPRPMEGLHEVGPPPFLTKTFDLVEDPATDAVLSWSRAGNSFIVWDPHVFAYGLLPRLFKHSNFSSFVRQLNTYGFRKVDPDRWEFANEGFLRGQRHLLKMIKRRKPPSAVAPLRQQRAPASCLEVGEFGFEEEIDRLKRDKNILITEVVKLRQEQQSTKDHVRAMEERLRVAEQKQVQMMGFLARAMRNPEFFQQLAQQQDKRKELEDTISKKRRRPIDNTPFYSDGESEQLDSQLKMFESGVLNGLNEPELENLAVNIQELGKGSIDDGNLTQVSDQSELNDDFWAELLVEDFGDKAGQPELEGRTEDVNDLAQQLGYLSSSSPK

SEQ ID NO: 411 - DNA, 1080 bp, Populus balsamifera subsp. trichocarpa
  misc_feature: Ceres ANNOT ID no.1452564
  misc_feature: Encodes the peptide sequence at SEQ ID NO 412
atgaatccatttttcactgtgaagcaagagtatgcaggatcaagttcatcgccaccgtccggcggtgatgagcccccaccagttatgctgccgccgcagccaagggaaggtttacatgatacaggaccaccaccattcctgactaagacttttgacatggtagatgacccaacgaccaatcacatagtttcttggaacagaggaggttctagctttgttgcctgggatcctcattcgttctccacaaatctccttcctagatacttcaaacataataatttttccagctttgtcaggcagctcaatacttatggttttagaaagattgatccagatagatgggagtttgccaatgaaggatttctgagcggtcaaaagcatctcttaaggaatataaagagaagaaaggcaccctctcagcctcttactcaacagcaagctccagatgcttgcgttgaagttggccgttttggattagatggagaaatcgatcgcttgagacgtgacaagcaggttttaatgatggaattagtgaaacttagacagcagcaacagaatgctagatcttatatacaagctatggaccaaaggctacaagcgatagagcaaaagcagcagcaaatgatgcaattcttagctagagcaatgcaaaatccagcctttttacagcagttagttcagcagaaggagaaaaggaaagagcttgaggaagcaatgactaaaaagagaaggcggcctattgatcaaggatctagtagaggtggtggtggtcgtcgtggtggtgaatcgagccatattggtggaagtgcaaaccccatcaaggcagagcctttagagtctggagaccttgaatttgaagtgtcagagctggaagcacttgcgttggaaatgcaagggtatggtagggcaaggagagagcaagaggatggagtagaagagctagagacaccagaaagtaaagatagagaacttgatgagggattttgggaagaactgttaaatgagagtgctggaggagatgaagatgatgtcaatacattagccgagcgcttgggttatctgggttcaagtcctaagtag

SEQ ID NO: 412 - protein, 331 aa, Populus balsamifera subsp. trichocarpa
  misc_feature: Ceres ANNOT ID no.1452564
  misc_feature: Bit score of 469.5 for HMM based on sequences of FIGURE 11.
  misc_feature (16)..(184): Pfam Name: HSF_DNA-bind Pfam Description: HSF-type DNA-binding
  misc_feature: Functional Homolog Of Ceres LOCUS ID no. At2g26150 at SEQ ID NO. 364
MLPPQPREGLHDTGPPPFLTKTFDMVDDPTTNHIVSWNRGGSSFVAWDPHSFSTNLLPRYFKHNNFSSFVRQLNTYGFRKIDPDRWEFANEGFLSGQKHLLRNIKRRKAPSQPLTQQQAPDACVEVGRFGLDGEIDRLRRDKQVLMMELVKLRQQQQNARSYIQAMDQRLQAIEQKQQQMMQFLARAMQNPAFLQQLVQQKEKRKELEEAMTKKRRRPIDQGSSRGGGGRRGGESSHIGGSANPIKAEPLESGDLEFEVSELEALALEMQGYGRARREQEDGVEELETPESKDRELDEGFWEELLNESAGGDEDDVNTLAERLGYLGSSPK

SEQ ID NO: 413 - protein, 358 aa, Oryza sativa subsp. japonica
  misc_feature: Public GI ID no.115482048
  misc_feature: Bit score of 899.4 for HMM based on sequences of FIGURE 11.
  misc_feature (41)..(210): Pfam Name: HSF_DNA-bind Pfam Description: HSF-type DNA-binding
  misc_feature: Functional Homolog Of Ceres LOCUS ID no. At2g26150 at SEQ ID NO. 364
MDPAAAGIVKEEMLESQQQQRQEDGGAAPRPMEGLHEVGPPPFLTKTYDLVEDPATDGVVSWSRAGNSFVVWDPHVFADLLLPRLFKHNNFSSFVRQLNTYGFRKVDPDRWEFANEGFLRGQRHLLKTIKRRKPPSNAPPSQQQSLTSCLEVGEFGFEEEIDRLKRDKNILITEVVKLRQEQQATKDHVKAMEDRLRAAEQKQVQMMGFLARAMRNPEFFQQLAQQKEKRKELEDAISKKRRRPIDNVPFYDPGETSQTEQLDSPYLFDSGVLNELSEPGIPELENLAVNIQDLGKGKVDEERQNQTNGQAELGDDFWAELLVEDFTGKEEQSELDGKIDGIDELAQQLGYLSSTSPK

SEQ ID NO: 414 - protein, 372 aa, Oryza sativa subsp. indica
  misc_feature: Public GI ID no.125557431
  misc_feature: Bit score of 522.9 for HMM based on sequences of FIGURE 11.
  misc_feature (51)..(219): Pfam Name: HSF_DNA-bind Pfam Description: HSF-type DNA-binding
  misc_feature: Functional Homolog Of Ceres LOCUS ID no. At2g26150 at SEQ ID NO. 364
MDDPMLNAVKEEESHGDGGGLEVVAGEDGAAAVAAGVAPRPMEGLHDAGPPPFLTKTYDMVDDAGTDAAVSWSATSNSFVVWDPHAFATVLLPRFFKHNNFSSFVRQLNTYGFRKVDPDRWEFANENFLRGQRHLLKNIKRRKPPSHTASNQQSLGPYLEVGHFGYDAEIDRLKRDKQLLMAEVVKLRQEQQNTKANLKAMEDRLQGTEQRQQQMMAFLARVMKNPEFLKQLMSQNEMRKELQDAISKKRRRRIDQGPEVDDVGTSSSIEQESPALFDPQESVEFLIDGIPSDLENSAMDAGGLVEPQDFDVGTSEQQQIGPQGELNDNFWEELLNEGLVGEENDNPVVEDDMNVLSEKMGYLNSNGPTAGE

SEQ ID NO: 415 - DNA, 1080 bp, Populus balsamifera subsp. trichocarpa
  misc_feature: Ceres ANNOT ID no.1442880
  misc_feature: Encodes the peptide sequence at SEQ ID NO 416
atgaatccatatctaacagtgaagcaagagtacgcaggatcaagtttattgcctctgtccggcggtgatgagccgccaacaatgatgctcccaccacagccgatggaaggtttacatgatacaggaccaccgccattcctgaccaagacttttgacatggtggatgacccaatgactaatcacatagtttcttggagcagaggagggtttagctttgttgtttgggatccttattctttctccgcaaatctccttcctagatacttcaagcataataatttctccagctttgtcaggcagctcaatacttatggctttagaaagattgatccagatagatgggagtttgccaatgaaggatttctgaggggtcaaaagcagcttctaaggaatataaagagaagaaaggcagcttctcagcctctttctcaacagcaagctccagatgcctgtgttgaagttagccgttttggattagatggagaaatcgatctcttgaaacgtgacaggcacgttttgatgatggaattagcgaagcttagacagcagcaacagaaagctagatcttatatacaagctatggagcaaaggctacaagggacagaacaaaagcagcagcagatgatgcaattcttagctcgagcaatgcaaaatcctgcctttctactgcagttagtccaacagaaagggaaaaggaaagaacttgaggaagcaatgactaaaaagagaagaattcctgttgatcaaagacctagtcgaagtggtggtggtgaatcaaaccgtattgatgaaagtgcaaaccccatcaaggcagaggctttagaatatggagactacggatttgaagtgtcagagctggaggcacttgcattggaaatgcaagggtatggcagggcaaggagagagcaagaggatggagtagaagagctagagccactagaaagcggagatagagaacttgacgagggattttgggaagaactgttaaatgagagtgctggaggaggtgaagatgaggatgtgaatacattagctgagcgcttgggttatttgcgttcaagtcctaagtacagaaattga

SEQ ID NO: 416 - protein, 331 aa, Populus balsamifera subsp. trichocarpa
  misc_feature: Ceres ANNOT ID no.1442880
  misc_feature: Bit score of 460.3 for HMM based on sequences of FIGURE 11.
  misc_feature (16)..(184): Pfam Name: HSF_DNA-bind Pfam Description: HSF-type DNA-binding
  misc_feature: Functional Homolog Of Ceres LOCUS ID no. At2g26150 at SEQ ID NO. 364
MLPPQPMEGLHDTGPPPFLTKTFDMVDDPMTNHIVSWSRGGFSFVVWDPYSFSANLLPRYFKHNNFSSFVRQLNTYGFRKIDPDRWEFANEGFLRGQKQLLRNIKRRKAASQPLSQQQAPDACVEVSRFGLDGEIDLLKRDRHVLMMELAKLRQQQQKARSYIQAMEQRLQGTEQKQQQMMQFLARAMQNPAFLLQLVQQKGKRKELEEAMTKKRRIPVDQRPSRSGGGESNRIDESANPIKAEALEYGDYGFEVSELEALALEMQGYGRARREQEDGVEELEPLESGDRELDEGFWEELLNESAGGGEDEDVNTLAERLGYLRSSPKYRN

SEQ ID NO: 417 - DNA, 1077 bp, Populus balsamifera subsp. trichocarpa
  misc_feature: Ceres ANNOT ID no.1463437
  misc_feature: Encodes the peptide sequence at SEQ ID NO 418
atgaatcgtcggggccgagcgatcaaggaggagtatgcaggtggtagttcaagcacatactcatcaggcatggcatctacagctattccacaaccaatggagggactccatgacccaggtcctcctccatttctcactaaaacttatgatataatagaagattcaagcacaaaccatattatctcttggagtagaggtaacaacagctttgttgtttgggatccccaagccttttccattagtctcctccctagatacttcaagcacaacaatttctcaagctttgttaggcagctaaacacatatgggtttagaaaggttgatccagatagatgggagtttgctaatgaaggatttctcagggggaaaaaacatcttctcaagactgttaggaggagaaaagctcctcaaactcagacttctcagcaagctctagaggcttgtgttgaagttggaacatttagactggatggggaagttgatcgattaagccgagacaaacaagtactaatggtggaactagtgaagcttagacagcaacaacagactactagagcttgccttcaacttatggaacaaagagttaaaaggaatgagaataaacagcaacatatgatgagtttcttggctagagcaatgcaaaatcccacctttgtgcagcaactagtccaacaaaaggacatgatgaaagagcttgaagaggagattagtaaaaagaaaaggcgaccgattgatcaagggcgtaataatgttgaggttggagaatttggccatggtgagggagtaggaacatttgttaaaattgaacctcgggagttcggtggtttttctgagtttgaagttccagaatttgtcaatctggctatgaacatgcaagaactaaatgaaaaccaactgatcaacttggatgaagaatgtattgaaaaaggagaagaatatgaaaataatggtaaagactttgatgaggctttctgggaagatttattgaatgaggatattggcgaacagggtgaagatgaggaagatgtaaacgtgttggttgagcagcttggttacttgggttatagtccaaagtag

SEQ ID NO: 418 - protein, 358 aa, Populus balsamifera subsp. trichocarpa
  misc_feature: Ceres ANNOT ID no.1463437
  misc_feature: Bit score of 482.7 for HMM based on sequences of FIGURE 11.
  misc_feature (42)..(209): Pfam Name: HSF_DNA-bind Pfam Description: HSF-type DNA-binding
  misc_feature: Functional Homolog Of Ceres LOCUS ID no. At2g26150 at SEQ ID NO. 364
MNRRGRAIKEEYAGGSSSTYSSGMASTAIPQPMEGLHDPGPPPFLTKTYDIIEDSSTNHIISWSRGNNSFVVWDPQAFSISLLPRYFKHNNFSSFVRQLNTYGFRKVDPDRWEFANEGFLRGKKHLLKTVRRRKAPQTQTSQQALEACVEVGTFRLDGEVDRLSRDKQVLMVELVKLRQQQQTTRACLQLMEQRVKRNENKQQHMMSFLARAMQNPTFVQQLVQQKDMMKELEEEISKKKRRPIDQGRNNVEVGEFGHGEGVGTFVKIEPREFGGFSEFEVPEFVNLAMNMQELNENQLINLDEECIEKGEEYENNGKDFDEAFWEDLLNEDIGEQGEDEEDVNVLVEQLGYLGYSPK

SEQ ID NO: 419 - protein, 510 aa, Glycine max; identical to SEQ ID NO: 321
  misc_feature: Public GI ID no.42415865
  misc_feature: Bit score of 872.7 for HMM based on sequences of FIGURE 11.
  misc_feature (29)..(204): Pfam Name: HSF_DNA-bind Pfam Description: HSF-type DNA-binding
  misc_feature: Functional Homolog Of Ceres LOCUS ID no. At2g26150 at SEQ ID NO. 364

SEQ ID NO: 420 - protein, 372 aa, Oryza sativa subsp. japonica
  misc_feature: Public GI ID no.33087081
  misc_feature: Bit score of 501.6 for HMM based on sequences of FIGURE 11.
  misc_feature (51)..(219): Pfam Name: HSF_DNA-bind Pfam Description: HSF-type DNA-binding
  misc_feature: Functional Homolog Of Ceres LOCUS ID no. At2g26150 at SEQ ID NO. 364
MDDPMLNAVKEEESHGDGGGLEVVAGEDGAAAVAAGLAPGPMEGLHDAGPPPFLTKTYDMVDDAGTDAAVSWSATSNSFVVWDPHAFATVLLPRFFKHNNFSSFVRQLNTYGFRKVDPDRWEFANENFLRGQRHLFKNIKRRKPPSHTASNQQSFGPYLEVGHFGYDAEIDRLKRDKQLLMAEVVKLRQEQQNTKANLKAMEDRLQGTEQRQKQMIAFLARVMKNPEFLKQLMSQNEMRKELQDAISKKRRRRIDQGPEVDDVGTSSSIEQESPALFDPQESVEFLIDGIPSDLENSAMDAGGLVEPQDFDVGASQQQQIGPQGELNDNFWEELLNEGLVGEENDNPVVEDDMNVLSEKMGYLNSNGPTAGE

SEQ ID NO: 421 - protein, 502 aa, Medicago sativa
  misc_feature: Public GI ID no.56117815
  misc_feature: Bit score of 1384.8 for HMM based on sequences of FIGURE 11.
  misc_feature (31)..(207): Pfam Name: HSF_DNA-bind Pfam Description: HSF-type DNA-binding
  misc_feature: Functional Homolog Of Ceres LOCUS ID no. At2g26150 at SEQ ID NO. 364
MDGASGGSGGGEGSTTQIPAPTPMLNANAPPPFLSKTYDMVDDPSTDAIVSWSATNNSFVVWDPPEFARDLLPKFFKHNNFSSFVRQLNTYGFRKVDPDRWEFANEGFLRGQKQLLKSISRRKPAHGHTQQQAQQPHGQSSSVGACVEVGKFGLEEEVERLKRDKNVLMQELVRLRQQQQTTDGQLQTMVQRLQGMEQRQQQMMSFLAKAVQSPGFFAQFVQQQNDSNRRITEVNKKRRLKQDGIAETTEQATPPDGQIVKYQPMMNETAKAMLRKIMKWDTPRVESFNKNPDNYLIGDGTSPSSAMDSSSSTSWNSGVTLQEVPPSSVQSTQIPMSTGTQGHIPSAEKPEILSVPQAAASANVMKDGTHAASTIPTSQADVIMPDIPSVPEIVPKSILDIPEDNYMAPETDDGFMDPSSLGSLPIDLDCLSPGADIDDLLSNSIWDDLLQTPIPEDFEANIDEISRGNEVQPTENGWDNNTQPLDQLTEQMGLLSSDAKRI

SEQ ID NO: 422 - protein, 561 aa, Medicago sativa
  misc_feature: Public GI ID no.115521217
  misc_feature: Bit score of 1314.0 for HMM based on sequences of FIGURE 11.
  misc_feature (31)..(207): Pfam Name: HSF_DNA-bind Pfam Description: HSF-type DNA-binding
  misc_feature: Functional Homolog Of Ceres LOCUS ID no. At2g26150 at SEQ ID NO. 364
MDGASGGSGGGEGSTTQIPAPTPMLNANAPPPFLSKTYDMVDDPSTDAIVSWSATNNSFVVWDPPEFARDLLPKFFKHNNFSSFVRQLNTYGFRKVDPDRWEFANEGFLRGQKQLLKSISRRKPAHGHTQQQAQQPHGQSSSVGACVEVGKFGLEEEVERLKRDKNVLMQELVRLRQQQQTTDGQLQTMVQRLQGMEQRQQQMMSFLAKAVQSPGFFAQFVQQQNDSNRRITEVNKKRRLKQDGIAETTEQATPPDGQIVKYQPMMNETAKAMLRKIMKWDTPRVESFNKNPDNYLIGDGTSPSSAMDSSSSTSWNSGVTLQEVPPSSVQSTQIPIMKWDTPRVESFNKNPDNYLIGDGTSPSSAMDSSSSTSWNSGVTLQEVPPSSVQSTQIPMSTGTQGHIPSAEKPEILSVPQAAASANVMKDGTHAASTIPTSQADVIMPDIPSVPEIVPKSILDIPEDNYMAPETDDGFMDPSSLGSLPIDLDCLSPGADIDDLLSNSIWDDLLQTPIPEDFEANIDEISRGNEVQPTENGWDNNTQPLDQLTEQMGLLSSDAKRI

SEQ ID NO: 423 - protein, 502 aa, Medicago sativa
  misc_feature: Public GI ID no.115521211
  misc_feature: Bit score of 1372.9 for HMM based on sequences of FIGURE 11.
  misc_feature (31)..(207): Pfam Name: HSF_DNA-bind Pfam Description: HSF-type DNA-binding
  misc_feature: Functional Homolog Of Ceres LOCUS ID no. At2g26150 at SEQ ID NO. 364
MDGASGGSGGGEGSTTQIPAPTPMQNANAPPPFLSKTYDMVDDPSTDAIVSWSATNNSFVVWDPPEFARDLLPKFFKHNNFSSFVRQLNTYGFRKVDPDRWEFANEGFLRGQKQLLKSISRRKPAHGHTQQQAQQPHGQSSSVGACVEVGKFGLEEEVERLKRDKNVLMQELVRLRQQQQTTDGQLQTMVQRLQGMEQRQQQMMSFLAKAVQSPGFFAQFVQQQNDSNRRITEVNKKRRLKQDGIAETTEQATPPDGQIVKYQPMMNETAKAMLRKIMKWDTPRVESFNKNPDNYLIGDGTSPSSAMDSSSSTSWNSGVTLQEVPPSSVQSTQIPVSTGTQGHIPSAEKPEILSVPQAAASANVMKDGTHAASTIPTSQADVIMPDIPSVPEIVPKSILDIPEDNYMAPETDDGFMDPSSLGSLPIDLDCLSPGADIDDLLSNSIWDDLLQTPIPEDFEANIDEISRGNEVQPTENGWDNNTQPLDQLTEQMGLLSSDAKRI

SEQ ID NO: 424 - protein, 502 aa, Medicago sativa
  misc_feature: Public GI ID no.115521215
  misc_feature: Bit score of 1369.9 for HMM based on sequences of FIGURE 11.
  misc_feature (31)..(207): Pfam Name: HSF_DNA-bind Pfam Description: HSF-type DNA-binding
  misc_feature: Functional Homolog Of Ceres LOCUS ID no. At2g26150 at SEQ ID NO. 364
MDGASGASGGGEGSTTQIPAPTPMQNANAPPPFLSKTYDMVDDPSTDAIVSWSATNNSFVVWDPPEFARDLLPKFFKHNNFSSFVRQLNTYGFRKVDPDRWEFANEGFLRGQKQLLKSISRRKPAHGHTQQQAQQPHGQSSSVGACVEVGKFGLEEEVERLKRDKNVLMQELVRLRQQQQTTDGQLQTMVQRLQGMEQRQQQMMSFLAKAVQSPGFFAQFVQQQNDSNRRITEVNKKRRLKQDGIAETTEQATPPDGQIVKYQPMMNETAKAMLRKIMKWDTPRVESFNKNPDNYLIGDGTSPSSAMDSSSSTSWNSGVTLQEVPPSSVQSTQIPVSTGTQGHIPSAEKPEILSVPQAAASANVMKDGTHAASTIPTSQADVIMPDIPSVPEIVPKSILDIPEDNYMAPETDDGFMDPSSLGSLPIDLDCLSPGADIDDLLSNSIWDDLLQTPIPEDFEANIDEISRGNEVQPTENGWDNNTQPLDQLTEQMGLLSSDAKRI

SEQ ID NO: 425 - DNA, 1533 bp, Populus balsamifera subsp. trichocarpa
  misc_feature: Ceres ANNOT ID no.1454376
  misc_feature: Encodes the peptide sequence at SEQ ID NO 426
atggtggttccagacggtggcgattttttcggctacgctcttgccggtgtttcttctgcatcattttctgcaacagctatgttaccaaaactcattttggatgatgatcattcattgacaaatgcaataaaatcggagaaagatcataaagtgggtcaagagagtaatatgtcccctttacacgacaccgcttgttgcggtggaggcggcgggacttcatctccatcatcatcatcatcaatgaatacaagagaaatgcagaaagcagcagcagtactggaggtagaggaggagaaaagaatcaaagcaacagcagtcacggtcaaagaagaagatgatgatggtgtagatagtctcaatgagttgaagggaggaggcggtggcggtaataataaaaataacaatgggatatcgtcgtcttcgtgttcctctgtggatttacctaaacccatggagggtttacatgaggcaggtccacctccgtttctgaagaagacatttgagatggtgggggatccggaaacggatgaaacagtgtcgtggggcaagaatcgcgatagttttgttgtttgggactctcatgaattctctaaaaatctgcttccaaagtatttcaagcacagtaatttctccagcttcattcgccagctaaatacctacggctttagaaagattgatccggatagatgggagtttgcaaatgaagggtttcacggtgccaagaagcatttgctaaagaccatcaagagaagaagcaggtataacaaacagcagagcggagcagttactggcgtcaatgattcaacaaaacctcgtttggaagctgaacttgaaaatctgaaggatgatcaggatgttttaaggttggaaatcttgaaaattagacagaagcagcaggagtcgcaaactcaactgagtgctgttgaagaacgcattcaagctgcagagtgcaagcaattgcagatgtttattttctttaccaaagctgccagaaatcctggatttattcaacaactaatccagaagagaaagcaaaaagggaaggtagatgggattgaattttgcaagaaaagacgactgcttcaaacccatctccctgaaagctttcctgctgccgtggataccaaccaaagcgtccattttaaaaaccatgctcaggaacaactggccacaatgcagaccgaaattactgagattttaactgaggatgtggagacctgccaaatgttgaaagtatttccagctccaatgagtgatgggttttgctgtccgatacttcaagatcataatgcaaatataatgtgcgaaaaaagtactcaagatatgtcctctgcttataatctaatgtcagagaagctactggatgatggttcggtgattgaggatttggttgatgaggaggtagatgtcaatgactcaaaactctaccttgaattagaggatttgattgggatgccacgaatgtggggtggatttgcaaccgagttagtagggcatacagctggttgtgttggatcaattcccagattgtaa

SEQ ID NO: 426 - protein, 454 aa, Populus balsamifera subsp. trichocarpa
  misc_feature: Ceres ANNOT ID no.1454376
  misc_feature: Bit score of 312.4 for HMM based on sequences of FIGURE 11.
  misc_feature (104)..(270): Pfam Name: HSF_DNA-bind Pfam Description: HSF-type DNA-binding
  misc_feature: Functional Homolog Of Ceres LOCUS ID no. At2g26150 at SEQ ID NO. 364
MSPLHDTACCGGGGGTSSPSSSSSMNTREMQKAAAVLEVEEEKRIKATAVTVKEEDDDGVDSLNELKGGGGGGNNKNNNGISSSSCSSVDLPKPMEGLHEAGPPPFLKKTFEMVGDPETDETVSWGKNRDSFVVWDSHEFSKNLLPKYFKHSNFSSFIRQLNTYGFRKIDPDRWEFANEGFHGAKKHLLKTIKRRSRYNKQQSGAVTGVNDSTKPRLEAELENLKDDQDVLRLEILKIRQKQQESQTQLSAVEERIQAAECKQLQMFIFFTKAARNPGFIQQLIQKRKQKGKVDGIEFCKKRRLLQTHLPESFPAAVDTNQSVHFKNHAQEQLATMQTEITEILTEDVETCQMLKVFPAPMSDGFCCPILQDHNANIMCEKSTQDMSSAYNLMSEKLLDDGSVIEDLVDEEVDVNDSKLYLELEDLIGMPRMWGGFATELVGHTAGCVGSIPRL

SEQ ID NO: 427 - DNA, 1720 bp, Triticum aestivum
  misc_feature: Ceres CLONE ID no.835571
  misc_feature: Encodes the peptide sequence at SEQ ID NO 428
gagctcgctcaagcgcctcaagtacgaagcctagagggatagtactgtactttcctctcccttcttctccgtctgcggtctgctgcttctgggcgtcaatggggagctctgccattttaggagaagcggagatcccctgaattggtcaatcagcattagtttgtttggtcgtttgatcatggatccctttcacggcattgtgaaagaggaggaattcgacttcgccggagctgcagcggatggctactcgccgtcttcctggggctcatccccgtcttcctggggctcttcccaatcttcctgggccggcggcggcgccttggcagagctgccgcggccgatggacggcctcggcgaggcgggccccacgcccttcctgaacaagacgtacgaggtggtggacgaccacagcacggacaccatcgtgtcgtggggcgtcgccgggaacagcttcgtggtgtgggacgcccacgccttctccatggtgctcctcccccgctacttcaagcactgcaacttctccagcttcgtccgccagctcaacacctatgggttcaggaaggttgatccggacaggtgggagttcgcggcggaggggttcctgcggggccagaaggagctgctgaagacgatcaggcgccggcggcctcagtcgtcgccgtctggcacgccggcgctgctgcagcagcagcagcagggccagcagggggcgtgcctggaggtggggcatttcgggcccgagggcgaggtgcagcggctgcagcgcgacaagggcaccctgatcgcggaggtggtgaagctgcggcaggagcagcaggcgacgcgagcgcagatgcaggagatggaggcgcgcctcgccgccacggagcagaagcagcagcagatgacggtgttcctggcgcgcgccatgaagagccccagcttcctccagatgctggtgcagcggcaggaccagagccggcggaaggagctcgcggaggcgctcctctccaagaagcgcggccgccccatcgagtacctcctcccccgcaacggcgagaccagcagcgccgcaagctacagcgccgcggcgcgaggctacggccctggtctcgccgacggcagtgacggcaggcgcgcggacggcgaggacacggagagcttctggaaggagctgctgagcctgggcctggaggagaggcatcgggaggctggcgggggcggcggggaggcgagcggcgccgaggtggacgacgacgtggacgatgaggtggacgagctggtgcagagcctctaccacctcagcccgaaccggccccacagccaccagtgaaggaagaacagaagacagaaggttctagagcgagaaatatctgctgccgcttggagaacaacgtagggccgcagcctgacaagtgacaaccccagcagtgagcgaaagaagataagaaggttctagaacaagaagtttccgctggagaacgtcgaacgtcgtggggtagaccgtaggcgtagtggtggtggtggtagcggtagtgctgcctccatgcccccatgggcgttgggggctggtctgctttgttcattttctattgctagttgtagtacctgacatgttgtcggggccccgcggcctgcatgcgcaagttgcccgaaacagaaaggggccagcgccttttgcctggcgtggtggaataatgctccgaggctttaccggattaagtactccaagttggacgtg

SEQ ID NO: 428 - protein, 377 aa, Triticum aestivum
  misc_feature: Ceres CLONE ID no.835571
  misc_feature: Bit score of 372.9 for HMM based on sequences of FIGURE 11.
  misc_feature (64)..(240): Pfam Name: HSF_DNA-bind Pfam Description: HSF-type DNA-binding
  misc_feature: Functional Homolog Of Ceres LOCUS ID no. At2g26150 at SEQ ID NO. 364
MDPFHGIVKEEEFDFAGAAADGYSPSSWGSSPSSWGSSQSSWAGGGALAELPRPMDGLGEAGPTPFLNKTYEVVDDHSTDTIVSWGVAGNSFVVWDAHAFSMVLLPRYFKHCNFSSFVRQLNTYGFRKVDPDRWEFAAEGFLRGQKELLKTIRRRRPQSSPSGTPALLQQQQQGQQGACLEVGHFGPEGEVQRLQRDKGTLIAEVVKLRQEQQATRAQMQEMEARLAATEQKQQQMTVFLARAMKSPSFLQMLVQRQDQSRRKELAEALLSKKRGRPIEYLLPRNGETSSAASYSAAARGYGPGLADGSDGRRADGEDTESFWKELLSLGLEERHREAGGGGGEASGAEVDDDVDDEVDELVQSLYHLSPNRPHSHQ

SEQ ID NO: 429 - DNA, 1524 bp, Populus balsamifera subsp. trichocarpa
  misc_feature: Ceres ANNOT ID no.1500046
  misc_feature: Encodes the peptide sequence at SEQ ID NO 430
atggatggaacaatcaactctgcaagcggtggcgactcctcgatcagcggcggtggggcacaagcggcgtcggtgccgatggcgtcacagtcgaatgcgccgccgccatttctaagtaagacttacgacatggtagacgatccggcgacagacgcggtggtgtcttggagttcgacgaataatagttttgtggtttggaatccgccggagttcgctcgcgatcttttgccgaagtatttcaagcataataatttctccagctttgttaggcaactgaacacttacggttttcgaaaggtggatccagaccgttgggaatttgccaatgaaggatttttgaggggtcagaagcacctgcttaggattatcagtcggcgaaaacctgcccacgggcatgctaatcaacagccacaacaaccgcatggacagaactcatcagttgccgcctgtgttgaggttgggaaatttgggctcgaggaagaggtggagaggcttaagagggacaagaatgtccttatgcaagaacttgttaggttgaggcagcagcaacagtccacagatagccagttgcaaaccatggtacagcgacttcaaggaatggagcagcgtcagcaacagatgatgtcattcctggccaaggcgatgaacagcccaggcttcttggctcagtttgtacagcagcaaaatgacaacaataggcgcataacggaagccaataaaaaacgaaggctcaagcaggaggatgttcctgagaatgagggttctggttctcatgatgggcagattgtgaagtatcagcctctgatgaatgaggcagcccaagcaatgcttaggcagattatgaaaatggatgcttcttctaagttggaatcttatgacaataatcttggtgcaaaagacagtggaagctcttcgagccacacatcaggagtgactcttcaagaggttctgccaacttcagggcaatccgctcatataccagcagcttttgggatttccaggcagggcccatcggctccaatatctgaaatacaatcttccctgcaaattgctagttctgaaaaggttacagcttctcagtttccggatataagtatgccggttggagcacagggggcaacctccatacctattcctcaggcagatgtgatcatgccccatgtttctcaaatgcttgaaatggtaccagaaaatgttgctgatatcccttgtgaagattacatggaaccagagacatgcaatgatggattcatagatctagcttcattaggaattaatggaatacccatagatattgataacatttcccctgatcctgatattgatgctttgcttgataattctagcttctgggatgaccttcttgtgcagagtccagagcatgaggatattgaatcaagttctgtagagggtaaagccaatggaaatgatgtgcagccaaatgcaaacgggtgggacaaagctcagcatgtggatcagctgacagaacaaatggagcttctgacatcagacaagaagctttaa

SEQ ID NO: 430 - protein, 507 aa, Populus balsamifera subsp. trichocarpa
  misc_feature: Ceres ANNOT ID no.1500046
  misc_feature: Bit score of 772.4 for HMM based on sequences of FIGURE 11.
  misc_feature (35)..(211): Pfam Name: HSF_DNA-bind Pfam Description: HSF-type DNA-binding
  misc_feature: Functional Homolog Of Ceres LOCUS ID no. At2g26150 at SEQ ID NO. 364
MDGTINSASGGDSSISGGGAQAASVPMASQSNAPPPFLSKTYDMVDDPATDAVVSWSSTNNSFVVWNPPEFARDLLPKYFKHNNFSSFVRQLNTYGFRKVDPDRWEFANEGFLRGQKHLLRIISRRKPAHGHANQQPQQPHGQNSSVAACVEVGKFGLEEEVERLKRDKNVLMQELVRLRQQQQSTDSQLQTMVQRLQGMEQRQQQMMSFLAKAMNSPGFLAQFVQQQNDNNRRITEANKKRRLKQEDVPENEGSGSHDGQIVKYQPLMNEAAQAMLRQIMKMDASSKLESYDNNLGAKDSGSSSSHTSGVTLQEVLPTSGQSAHIPAAFGISRQGPSAPISEIQSSLQIASSEKVTASQFPDISMPVGAQGATSIPIPQADVIMPHVSQMLEMVPENVADIPCEDYMEPETCNDGFIDLASLGINGIPIDIDNISPDPDIDALLDNSSFWDDLLVQSPEHEDIESSSVEGKANGNDVQPNANGWDKAQHVDQLTEQMELLTSDKKL

SEQ ID NO: 431 - protein, 480 aa, Arabidopsis thaliana
  misc_feature: Public GI ID no.110738569
  misc_feature: Bit score of 504.9 for HMM based on sequences of FIGURE 11.
  misc_feature (36)..(219): Pfam Name: HSF_DNA-bind Pfam Description: HSF-type DNA-binding
  misc_feature: Functional Homolog Of Ceres LOCUS ID no. At2g26150 at SEQ ID NO. 364
MDGVTGGGTNIGEAVTAPPPRNPHPATLLNANSLPPPFLSKTYDMVEDPATDAIVSWSPTNNSFIVWDPPEFSRDLLPKYFKHNNFSSFVRQLNTYGFRKVDPDRWEFANEGFLRGQKHLLKKISRRKSVQGHGSSSSNPQSQQLSQGQGSMAALSSCVEVGKFGLEEEVEQLKRDKNVLMQELVKLRQQQQTTDNKLQVLVKHLQVMEQRQQQIMSFLAKAVQNPTFLSQFIQKQTDSNMHVTEANKKRRLREDSTAATESNSHSHSLEASDGQIVKYQPLRNDSMMWNMMKTDDKYPFLDGFSSPNQVSGVTLQEVLPITSGQSQAYASVPSGQPLSYLPSTSTSLPDTIMPETSQIPQLTRESINDFPTENFMDTEKNVPEAFISPSPFLDGGSVPIQLEGIPEDPEIDELMSNFEFLEEYMPESPVFGDATTLENNNNNNNNNNNNNNNNNNNNTNGRHMDKLIEELGLLTSETEH

SEQ ID NO: 432 - protein, 379 aa, Oryza sativa subsp. indica
  misc_feature: Public GI ID no.125542510
  misc_feature: Bit score of 536.3 for HMM based on sequences of FIGURE 11.
  misc_feature (36)..(224): Pfam Name: HSF_DNA-bind Pfam Description: HSF-type DNA-binding
  misc_feature: Functional Homolog Of Ceres LOCUS ID no. At2g26150 at SEQ ID NO. 364
MEKMMPGMVKEEWPPSSPEEGEAPRPMEGLHEVGPPPFLTKTFDLVADPATDGVVSWGRAGSSFVVWDPHVFAAVLLPRFFKHNNFSSFVRQLNTYFLVRTNYLNKQSHFYSLRFQGFRKIDPDRWEFANDGFLRGQRHLLKMIKRRRPLSYLPGSQQALGTCLEVGQFGLDEEIDRLKRDKNILLAEVVKLRHKQQSTKANMRAMEERLQHAEQKQVQMMGFLARAMQNPDFFHQLIHQQDKMKGLEDTFSKKRTRSIDIVPFLNPGEVSQGDQLESTLLFDPRPFAELNDEPAKSELENLALNIQGLGKGKQDVNRTRNQPRNQASNETELTDDFWEELLNEGARDDAGIPGMERRRPRYVDALAQKLGYLSNSSQK

SEQ ID NO: 433 - protein, 481 aa, Arabidopsis thaliana; identical to SEQ ID NO: 336
  misc_feature: Public GI ID no.30686034
  misc_feature: Bit score of 506.8 for HMM based on sequences of FIGURE 11.
  misc_feature (26)..(200): Pfam Name: HSF_DNA-bind Pfam Description: HSF-type DNA-binding
  misc_feature: Functional Homolog Of Ceres LOCUS ID no. At2g26150 at SEQ ID NO. 364

SEQ ID NO: 434 - protein, 384 aa, Oryza sativa subsp. japonica
  misc_feature: Public GI ID no.125570883
  misc_feature: Bit score of 246.2 for HMM based on sequences of FIGURE 11.
  misc_feature (73)..(168): Pfam Name: HSF_DNA-bind Pfam Description: HSF-type DNA-binding
  misc_feature: Functional Homolog Of Ceres LOCUS ID no. At2g26150 at SEQ ID NO. 364
MASSSSSSSLCRLLIPRPTTRRFSGGGGEGGMAAAAPVKREVKPEAGEGWGGGDLGVVPPPPRPMEGLGEAGPAPFVAKTYEMVADAATDAVVSWGPGGSGASFVVWDPHALAAGVLPRFFKHANFSSFVRQLNTYGFRKVTPDRWEFANEAFLAGQKHLLKNIKRRRVSKPLVDSQLRNKASVVFGQPEAPGEVVSLKRDRAALRAEVIMLKQQYNACKSQLIAMEEMVRNIERRQQQTIGFFAKVLTNPAFVQQVLLNYVNKNGLRGAAKRQRLMENEEQHADSPLNKGMEAASVMEADVSPGSTGCGTVGKVETTPMCNFQNIENMCDDVWEELDALPETGMEQEEKAGIGSFDVEEFVGRPCGWVDDCPYLVEPMQFVEH

SEQ ID NO: 435 - protein, 485 aa, Arabidopsis thaliana; identical to SEQ ID NO: 311
  misc_feature: Public GI ID no.42562463
  misc_feature: Bit score of 552.4 for HMM based on sequences of FIGURE 11.
  misc_feature (36)..(214): Pfam Name: HSF_DNA-bind Pfam Description: HSF-type DNA-binding
  misc_feature: Functional Homolog Of Ceres LOCUS ID no. At2g26150 at SEQ ID NO. 364

SEQ ID NO: 436 - protein, 198 aa, Gossypium hirsutum
  misc_feature: Ceres CLONE ID no.100043265
  misc_feature: Bit score of 113.4 for HMM based on sequences of FIGURE 11.
  misc_feature (45)..(195): Pfam Name: HSF_DNA-bind Pfam Description: HSF-type DNA-binding
  misc_feature: Functional Homolog Of Ceres LOCUS ID no. At2g26150 at SEQ ID NO. 364
MNPYFPVKEEYPNSSYSQSDDDPPLMMMGPPPPQPMESLRDSGPPPFLTKTFDIVDDPSTNYIVSWSRGGSSFVVWDPHAFSTNLLPRYFKHNNFSSFVRQLNTYGFRKTDPDKWEFANEGFLRGHKHLLKNIRRRKTTSQPPPSQQPLGPCVEVGRFGVDGEVGRLKRDKQVLMMELVKLRQQQQSTRAYIEAMEER

SEQ ID NO: 437 - DNA, 1089 bp, Sorghum bicolor
  misc_feature: Ceres ANNOT ID no.6089790
  misc_feature: Encodes the peptide sequence at SEQ ID NO 438
atggacccttcggtggcgccgggcattgtcaaggaggagctcctggagcagcagcagccgctgcaggacggtgtgggtgacggcgggggtgcgccgcgcccgatggaggggctgcacgaggtgggtcccccgccgttcctcaccaagacgttcgacctggtggaggacccggccaccgacgccgtcgtctcctggagccgtgccggcaacagcttcgtcgtctgggacccgcacgtcttcgccgacacgatgctcccacgcctcttcaagcacagcaacttctccagcttcgtgcgccagctcaacacctatggcttcagaaaggttgatcctgacaggtgggagtttgcaaatgaaggttttctcaggggtcaaaggcacctgcttaagatgataaagagaaggaagccaccatcagctgtgccaccattgcgacagcagcaggcccctgcttcttgcctggaggttggtgagtttggatttgaggaagagattgataggctgaagcgtgacaagaacattttgatcacagaagtagtaaagctaaggcaggagcagcaaactactaaagatcatgtgagggccatggaggaaaggctacgagtggctgaacagaagcaggttcagatgatggggttcttggcaagagcaatgcggaatccagagtttttccagcagttggtccagcagcaagacaagagaaaggagctcgaggatgctatttcaaagaaaagaaggcggcccattgacaacactccgttctacagtactggggaaacaagtcagggcgagcagcttgattcacagtttatgttcgagtcagatgtgctcaatgggctcagtgaacctggaatgcctgagctggagaatttagcagtgaacattcaggagcttgggaagggaagcatagatggcgagaaggtggctcaagctagtgaccagtcagagctgaatgatgacttctgggcagagctgttggtcgaagatttcggagacaaggcaggacagtcagagttggagggaagaactgaagacgtggatgaccttgctcaacaactggggtatctgagtaattctagcccaaagtag

SEQ ID NO: 438 - protein, 362 aa, Sorghum bicolor
  misc_feature: Ceres ANNOT ID no.6089790
  misc_feature: Bit score of 863.8 for HMM based on sequences of FIGURE 11.
  misc_feature (44)..(214): Pfam Name: HSF_DNA-bind Pfam Description: HSF-type DNA-binding
  misc_feature: Functional Homolog Of Ceres LOCUS ID no. At2g26150 at SEQ ID NO. 364
MDPSVAPGIVKEELLEQQQPLQDGVGDGGGAPRPMEGLHEVGPPPFLTKTFDLVEDPATDAVVSWSRAGNSFVVWDPHVFADTMLPRLFKHSNFSSFVRQLNTYGFRKVDPDRWEFANEGFLRGQRHLLKMIKRRKPPSAVPPLRQQQAPASCLEVGEFGFEEEIDRLKRDKNILITEVVKLRQEQQTTKDHVRAMEERLRVAEQKQVQMMGFLARAMRNPEFFQQLVQQQDKRKELEDAISKKRRRPIDNTPFYSTGETSQGEQLDSQFMFESDVLNGLSEPGMPELENLAVNIQELGKGSIDGEKVAQASDQSELNDDFWAELLVEDFGDKAGQSELEGRTEDVDDLAQQLGYLSNSSPK

SEQ ID NO: 439 - DNA, 1185 bp, Sorghum bicolor
  misc_feature: Ceres ANNOT ID no.6043635
  misc_feature: Encodes the peptide sequence at SEQ ID NO 440
atgggctcctcctcgtgcccgctctcgggctcccccgggccaagcggctccaattccaagcccaggacgacggcgcgcgccagcggcgtcgggttcggaggcgtagcaatggcgcggagcgtggccgtggcggcagtgaagctggagccgaagccggagccgtgggcggcgggcgcagaggaggcgtcgtcagtggtgccgcggtcgatggaggggccgccgctccctgcgccgttcgtgtcgaagacgtacgagatggtggcggacgcggccacggacgccgtggtgtcgtgggcgcccggcggcgcggggaacagcttcgtggtgtgggacccgcgggcgctcgccgccggcatcctcccgcgcttcttcaagcacgccaacttcgcgtccttcatcaggcagctcaacatctacggattcaggaaggtgaatccggatcgttgggagtttgcaaacgaatccttcttagcaggccagaagcatttgctgaaaaatatcaagaggaggcgtgcttccaagcctcagatggaagcaaagccaagaaactgtgctggtgcttgtctcggttcgccgaaggatcccagcgaggtcgagagtttgaaacgagaccgcgcagcgctcagggccgaagtcatcacgctaaggcagcagtacaacatctgcaaatcccaactcgtcgccttggaggagaggatcctgaacaacgagaggaaccagcagagggccatcgccttcttcgcaaaggtgctcagcaacccaggtttcgtgcagcaggtcctgctcaactatgccaaggagaaagaactacgtggcgcttccaaaagacagcggctgatggaaaacgaagaacatcggcacggcgatttgccactgaggagtggcaccgaagctgcgtttgcgacagtggcggctggcgttggcgtctctgcggggagcagccatggtggcacagccgcgaaacaggagcctgggcctgagttgaatggtcaggagatggacagtatttggtatgatgtgtgggacgagctggacgcgataccaggcgctgaaatggaccggcgagaagcagacaagggcgtggctggcttcgacgtcgaggatttcagtggacggccttgcggttgggatgatgactgctcgtatctcgcggagccgatgcagtttgtggagcactatgactag

SEQ ID NO: 440 - protein, 394 aa, Sorghum bicolor
  misc_feature: Ceres ANNOT ID no.6043635
  misc_feature: Bit score of 194.4 for HMM based on sequences of FIGURE 11.
  misc_feature (76)..(246): Pfam Name: HSF_DNA-bind Pfam Description: HSF-type DNA-binding
  misc_feature: Functional Homolog Of Ceres LOCUS ID no. At2g26150 at SEQ ID NO. 364
MGSSSCPLSGSPGPSGSNSKPRTTARASGVGFGGVAMARSVAVAAVKLEPKPEPWAAGAEEASSVVPRSMEGPPLPAPFVSKTYEMVADAATDAVVSWAPGGAGNSFVVWDPRALAAGILPRFFKHANFASFIRQLNIYGFRKVNPDRWEFANESFLAGQKHLLKNIKRRRASKPQMEAKPRNCAGACLGSPKDPSEVESLKRDRAALRAEVITLRQQYNICKSQLVALEERILNNERNQQRAIAFFAKVLSNPGFVQQVLLNYAKEKELRGASKRQRLMENEEHRHGDLPLRSGTEAAFATVAAGVGVSAGSSHGGTAAKQEPGPELNGQEMDSIWYDVWDELDAIPGAEMDRREADKGVAGFDVEDFSGRPCGWDDDCSYLAEPMQFVEHYD

SEQ ID NO: 441 - DNA, 715 bp, Arabidopsis thaliana
  misc_feature: Ceres SEEDLINE ID no.ME00029
  misc_feature: Encodes the peptide sequence at SEQ ID NO. 442
atattcatcactttcgttgttaagacggaaaaaaaaaaaacagaggcagaaccaaaaaactttagggttcgatttcgctccttggtaatcaccatgtccggagaagaagaagagaacgccgccgaactcaagatcggagatgagtttttgaaggcaaagtgcttaatgaactgtgaagtctctttgattcttgagcacaagtttgaacagcttcagcaaatctcagaggatcctatgaatcaagtttctcaagtgtttgagaagtccttgcaatatgtgaagcgattcagccgctacaagaatccagatgctgtaagacaagttcgagaaatactaagcagacatcaactcactgagtttgagctatgtgttcttggcaatctctgtcccgaaactgttgaagaagcagtggcaatggttccttctcttaagacaaaaggaagagctcatgatgatgaagctattgagaagatgctcaatgatctctcacttgtcaagagattcgagtagtgcagaagattctcaagatctaagattctgaacatttagcaggatgctttacttgccttctagctgatctggagttaattcgccacgtctgaaattataaagctttaatgcctagaatttctggaatgataccttcatgttaaatgaatgtaatttacaacggatgatccaagcttttaatgaaatataccatctctttttcacc

SEQ ID NO: 442 - protein, 138 aa, Arabidopsis thaliana
  misc_feature: Ceres SEEDLINE ID no.ME00029
  misc_feature: Bit score of 371.5 for HMM based on sequences of FIGURE 1.
  misc_feature (19)..(135): Pfam Name: RNA_pol_Rpb4 Pfam Description: RNA polymerase Rpb4
MSGEEEENAAELKIGDEFLKAKCLMNCEVSLILEHKFEQLQQISEDPMNQVSQVFEKSLQYVKRFSRYKNPDAVRQVREILSRHQLTEFELCVLGNLCPETVEEAVAMVPSLKTKGRAHDDEAIEKMLNDLSLVKRFE

SEQ ID NO: 443 - protein, 138 aa, Brassica rapa subsp. pekinensis
  misc_feature: Public GI ID no.72384401
  misc_feature: Bit score of 371.9 for HMM based on sequences of FIGURE 1.
  misc_feature (19)..(135): Pfam Name: RNA_pol_Rpb4 Pfam Description: RNA polymerase Rpb4
  misc_feature: Functional Homolog Of Ceres SEEDLINE ID no. ME00029 at SEQ ID NO. 442
MSGEEEENAAELKIGDEFLKAKCLMNCEVSLILEHKYEQLQQVSEDPMNQVSQVFEKSLQYVKRFSRYKNPDAVRQVREILSRHQLTEFELCVLGNLCPETAEEAVAMVPSLKTKGRAHSDEAIEKMLNDLSLVKRFE

SEQ ID NO: 444 - DNA, 514 bp, Brassica napus
  misc_feature: Ceres CLONE ID no.1079382
  misc_feature: Encodes the peptide sequence at SEQ ID NO 445
agagttgcttgtttcgctgtcagaacgagagaaaaaaagcttagggttcgatctcggttcactcgccatgtccggagaagaagaagaagagaacgccgccgagctcaagatcggagacgagtttttgaaggcgaagtgtttaatgaactgtgaagtgtctttgatccttgagcacaagtatgaacagcttcagctggtctccgaggatcctatgaaccaagtctctcaagtgtttgagaagtcgttgcagtatgtgaagcgttttagccgctacaagaatccagatgctgtacgacaagttcgagaaatactgagtagacatcaactcactgagtttgagctctgtgttcttggcaatctctgtcctgaaactgctgaagaagcagtggcaatggttccttctctcaagacgaaaggaagagctcatagtgatgaagcaattgagaagatgctcaatgatctctcccttgtcaagagattcgagtagtagtgcaaaacattctcaagattgaag

SEQ ID NO: 445 - protein, 139 aa, Brassica napus
  misc_feature: Ceres CLONE ID no.1079382
  misc_feature: Bit score of 365.4 for HMM based on sequences of FIGURE 1.
  misc_feature (20)..(136): Pfam Name: RNA_pol_Rpb4 Pfam Description: RNA polymerase Rpb4
  misc_feature: Functional Homolog Of Ceres SEEDLINE ID no. ME00029 at SEQ ID NO. 442
MSGEEEEENAAELKIGDEFLKAKCLMNCEVSLILEHKYEQLQLVSEDPMNQVSQVFEKSLQYVKRFSRYKNPDAVRQVREILSRHQLTEFELCVLGNLCPETAEEAVAMVPSLKTKGRAHSDEAIEKMLNDLSLVKRFE

SEQ ID NO: 446 - DNA, 911 bp, Gossypium hirsutum
  misc_feature: Ceres CLONE ID no.1853461
  misc_feature: Encodes the peptide sequence at SEQ ID NO 447
aacctagaaactcaaaatcaaattttaggttttctccgacttcacgcatcgaaatcaagcagacgaaaaccatctttgtctaataatgtctggcgaagaggaagaaaacgctgctgagctcaaaattggagaagagtttttgaaggcgaagtgtttgatgaattgtgaagtggctttaattctcgagcataagtatgagcagcttcagcaaatgtctgacgatcccatgaatcaagtttcccaggtattcgagaagtcactgcagtatgtaaaacgctttagccgttataaaaatccagatgctgtgagacaagttcgagaaattctgagtagatatcagttagctgaattcgagctttgtgttcttggcaacctgtgtcctgaaactgtggaggaagcaatcgctatggtgccttccatcaagactaaagggcgggctcacgacgacgatgccatcgagagaatgctaaatgacctttcccttatcaagaaatttgaatagtggccgctaaattactggctgtctatgacactgaagacatgaatagaatgttgaatgccccgtctcatataaaatatacatttttatctattttacccatgtcagtttgggattgacctaaaaagttgtagtgtgtcgaatggtttacgttctgtaaatttctcattaaggtgttgcaaacccgcatgtctcaaaacggcttttgctgttcattctcgtgattttttgtaagtttatactcttatgattgatctaattttttttcttcaaatgtaataattgcatttaatactatattgttgtaatatgtatattaattagtgaggtgaaaatatgagttgaaacatcgaatcatgatcaattgatctaaaaaaaaaaaaaaaaaaaaaaaaaaaaaaaaaaaaaaaaa

SEQ ID NO: 447 - protein, 138 aa, Gossypium hirsutum
  misc_feature: Ceres CLONE ID no.1853461
  misc_feature: Bit score of 380.8 for HMM based on sequences of FIGURE 1.
  misc_feature (19)..(135): Pfam Name: RNA_pol_Rpb4 Pfam Description: RNA polymerase Rpb4
  misc_feature: Functional Homolog Of Ceres SEEDLINE ID no. ME00029 at SEQ ID NO. 442
MSGEEEENAAELKIGEEFLKAKCLMNCEVALILEHKYEQLQQMSDDPMNQVSQVFEKSLQYVKRFSRYKNPDAVRQVREILSRYQLAEFELCVLGNLCPETVEEAIAMVPSIKTKGRAHDDDAIERMLNDLSLIKKFE

SEQ ID NO: 448 - DNA, 757 bp, Gossypium hirsutum
  misc_feature: Ceres CLONE ID no.1915549
  misc_feature: Encodes the peptide sequence at SEQ ID NO 449
aattcgattcgaaaccctaaatctcaatcccatttcaaaccccagacatcataaatctcaaacttcaaaaccttcatttctaaattggttattgaaaaccaaaaaaaaaaacagtttccttctgccttgggactgaaagagagcatttctaacaatgtctggcgaagaggaagaaaacgcagctgagctcaaaattggagaagagtttttgaaggcgaagtgtttgatgaattgtgaagtggctctaattcttgagcacaagtatgagcagcttcagcaaatgtctgacgatcccatgaatcaagtttcccaggtattcgagaagtcactgcagtatgtaaaacgcttcagccgttataaaaatccagattctgttaggcaagttcgagaaattttgagtagatatcagttagctgaattcgagctttgtgttcttggcaacctgtgtcctgaaactgtggaggaagcaatcgctatggtgccttccatcaagactaaaggacgggctcacgacgacgatgccatcgagagaatgctaaatgacttgtcccttatcaagaaatttgaatagtggccgctaaattactggctgtctatgacactgaagacattaatagaatgttgaatgccctttctcttataaaatatacatttttatctattttacccatgtgacccaaaaatcttaagtgtgtcaaatggtttatgttcagtaaatttctcattaaggtgctgcgaaaaaaaaaaaaaaaaaaaa

SEQ ID NO: 449 - protein, 138 aa, Gossypium hirsutum
  misc_feature: Ceres CLONE ID no.1915549
  misc_feature: Bit score of 377.9 for HMM based on sequences of FIGURE 1.
  misc_feature (19)..(135): Pfam Name: RNA_pol_Rpb4 Pfam Description: RNA polymerase Rpb4
  misc_feature: Functional Homolog Of Ceres SEEDLINE ID no. ME00029 at SEQ ID NO. 442
MSGEEEENAAELKIGEEFLKAKCLMNCEVALILEHKYEQLQQMSDDPMNQVSQVFEKSLQYVKRFSRYKNPDSVRQVREILSRYQLAEFELCVLGNLCPETVEEAIAMVPSIKTKGRAHDDDAIERMLNDLSLIKKFE

SEQ ID NO: 450 - DNA, 669 bp, Glycine max
  misc_feature: Ceres CLONE ID no.1626485
  misc_feature: Encodes the peptide sequence at SEQ ID NO 451
acaacatctcgcaaaactattcaaaaccagacacacacacaaacaaacgctgaatctctcgtcgttctttttatttgcggtttcttcttcttctcacgttctacctaacattttctaaaacatgtctggggaagaggaagaaaacgccgcagagctcaaaattggagacgagtttttgaaggcaaagtgcttaatgaactgtgaagtttcattgattcttgagcacaagtatgagcagcttcaacagacatccgatgatcccatgaatcaagtttctcaggtatttgaaaagtcactgcagtatgtgaagcgtttcagccgctataaaaatcctgatgctgttagacaagttcgagaaattctcgcaagatatcaattggctgagtttgagttgtgtgtccttggaaacctttgcccggaaactgtggaggaagctattgccatggttccatctatcaagtcaagaggacgggctcaggatgatgaagccatcgagaaaatgttaaatgacctgtcattgattaagaaatttgaataaatacgcagagtgtgtgatatagtgttgttggtaccgtataacatatcacttgactgcaagcatacattcatgtggtttgtattacagaaaacccttggtaattatatttagtagtttattttgtgacagtt

SEQ ID NO: 451 - protein, 138 aa, Glycine max
  misc_feature: Ceres CLONE ID no.1626485
  misc_feature: Bit score of 376.5 for HMM based on sequences of FIGURE 1.
  misc_feature (19)..(135): Pfam Name: RNA_pol_Rpb4 Pfam Description: RNA polymerase Rpb4
  misc_feature: Functional Homolog Of Ceres SEEDLINE ID no. ME00029 at SEQ ID NO. 442
MSGEEEENAAELKIGDEFLKAKCLMNCEVSLILEHKYEQLQQTSDDPMNQVSQVFEKSLQYVKRFSRYKNPDAVRQVREILARYQLAEFELCVLGNLCPETVEEAIAMVPSIKSRGRAQDDEAIEKMLNDLSLIKKFE

SEQ ID NO: 452 - DNA, 697 bp, Glycine max
  misc_feature: Ceres CLONE ID no.529871
  misc_feature: Encodes the peptide sequence at SEQ ID NO 453
agatagataagcatacgcaacgcaagaatagagaactgcgtagcgacccatcagagaagatcgcgatcttctgaaacatgtctggggaagaggaagaaaacgccgcagagctcaaaattggagacgagtttttgaaggcaaagtgcttaatgaactgtgaagttgcattgattcttgagcacaagtatgagcagcttcaacagacatccgatgatcccatgaatcaagtttctcaggtatttgaaaagtcactgcagtatgtgaagcgcttcagccgctataaaaatcccgatgctgttagacaagttcgagaaattctcgccagatatgaattggctgagtttgagttgtgtgtccttggcaacctttgcccagaaactgtggaggaagctattgctatggttccatctatcaagtcaagaggacgggctcaggatgatgaagcaatcgagaaaatgttaaatgacctgtcgttgattaagaaatttgaataaatacgtcaaagtgtgtgatataactgacatatcacttaactgcaagcaaacattcttgtggtttgtattacaaaaacgcttggtaattatatttagttcattttgtgactgttatcgagtaggattttgacacatgcgaactggtgtatgaaagtgcttttgacctgttatgatgattatgcgaatgtgattattgtcttacc

SEQ ID NO: 453 - protein, 138 aa, Glycine max
  misc_feature: Ceres CLONE ID no.529871
  misc_feature: Bit score of 375.8 for HMM based on sequences of FIGURE 1.
  misc_feature (19)..(135): Pfam Name: RNA_pol_Rpb4 Pfam Description: RNA polymerase Rpb4
  misc_feature: Functional Homolog Of Ceres SEEDLINE ID no. ME00029 at SEQ ID NO. 442
MSGEEEENAAELKIGDEFLKAKCLMNCEVALILEHKYEQLQQTSDDPMNQVSQVFEKSLQYVKRFSRYKNPDAVRQVREILARYELAEFELCVLGNLCPETVEEAIAMVPSIKSRGRAQDDEAIEKMLNDLSLIKKFE

SEQ ID NO: 454 - DNA, 512 bp, Brassica napus
  misc_feature: Ceres CLONE ID no.1067079
  misc_feature: Encodes the peptide sequence at SEQ ID NO 455
actgagattgtttcttttggccttataattctctttcactcgttcgacgagaaaaatcaaaatcaagagaagaaaaaagataatctctaaagggttcgatttgcctcgcaatgtctggagaagaagaagagaacgccgccgagctcaagatcggagacgagtttttgaaggcgaagtgcttaatgaactgtgaagtgtctttgatccttgagcacaagtacgagcagctgcagcaagtctctgaggatcctatgaatcaagtttctcaagtgtttgagaagtccttgcagtatgtgaagcgatttagccgctacaagaatccagatgctgttcgacaagttcgagaaatcttgagtagacatcaactcactgagtttgagctttgcgttcttggcaatctatgtcccgaaactgctgaagaagctgtggctatggttccttctctcaagacaaaaggaagagctcacagtgatgaatgcaattgagaagatgctcaatgatctctcccttgt

SEQ ID NO: 455 - protein, 124 aa, Brassica napus
  misc_feature: Ceres CLONE ID no.1067079
  misc_feature: Bit score of 302.9 for HMM based on sequences of FIGURE 1.
  misc_feature (19)..(122): Pfam Name: RNA_pol_Rpb4 Pfam Description: RNA polymerase Rpb4
  misc_feature: Functional Homolog Of Ceres SEEDLINE ID no. ME00029 at SEQ ID NO. 442
MSGEEEENAAELKIGDEFLKAKCLMNCEVSLILEHKYEQLQQVSEDPMNQVSQVFEKSLQYVKRFSRYKNPDAVRQVREILSRHQLTEFELCVLGNLCPETAEEAVAMVPSLKTKGRAHSDECN

SEQ ID NO: 456 - DNA, 476 bp, Brassica napus
  misc_feature: Ceres CLONE ID no.1079572
  misc_feature: Encodes the peptide sequence at SEQ ID NO 457
agatagtttctttggccttatacaataattctctttcactcgttcgacgagaaaaatcaaaatcaagagaagaaaaaagataatctaaaagggttcgatttgccacgcaatgtctggagaagaagaagagaacgccgccgagctcaagatcggcgacgagtttttgaaggcgaagtgcttaatgaactgtgaagtgtcgttgatcctcgagcacaagtacgaacagcttcagcacgtctccgaggatcctatgaatcaagtttctcaagtgtttgagaagtcgttgcagtatgtgaagcgatttagccgctacaagaatccagatgctgttcgacaagttcgagaaatcctgagtagacatcagctcactgagtttgagctttgtgttcttggcaatctctgtcctgaaactgctgaagaagcagtggctatggttccctccctcaagacaaaaggaagagctcatagtgatgaag

SEQ ID NO: 457 - protein, 122 aa, Brassica napus
  misc_feature: Ceres CLONE ID no.1079572
  misc_feature: Bit score of 303.3 for HMM based on sequences of FIGURE 1.
  misc_feature (19)..(122): Pfam Name: RNA_pol_Rpb4 Pfam Description: RNA polymerase Rpb4
  misc_feature: Functional Homolog Of Ceres SEEDLINE ID no. ME00029 at SEQ ID NO. 442
MSGEEEENAAELKIGDEFLKAKCLMNCEVSLILEHKYEQLQHVSEDPMNQVSQVFEKSLQYVKRFSRYKNPDAVRQVREILSRHQLTEFELCVLGNLCPETAEEAVAMVPSLKTKGRAHSDE

SEQ ID NO: 458 - DNA, 740 bp, Musa acuminata
  misc_feature: Ceres CLONE ID no.1713920
  misc_feature: Encodes the peptide sequence at SEQ ID NO 459
gcgcgcagagaagtcgatccactccgtcgacgcccacctttcgttccctcgtctccgcctcctgaatctttcaagtttctttgccgggcgaacatgtctggggaggaggaagagaacgccgccgaactaaagatcggcgaagaatttttgaaggcaaagtgtttgatgaactgtgaagttgcacgtattctggaccataaatatgaccagcttcagcagacgtcagatgatcctacaaaccagatatcccaggtgtttgaaaagtcaatgcagtatgtgaagcgctttagccgctacaagaaccctgatgcagtgagacaagtccgagaagtgttaagcagatataagttggctgaatttgagctttgtgtgctcggaaatctctgtcctgaaactgttgaagaagctatcgcaattgtcccatctatcaagagcaaagggcggatgcttgaagatgatgcgatcgagaaaatgctgcatgatctctcactgattaagaaatttgaatagtttcattcatgcagtgaacggtttgaacactttcggggtgcagcttatttaggttgatgttagtgacttatcctatgggtaataattagaacttaaaaccttttgagacttgtgtaggatctgttggacagaatctatcaatccagttatctcctaataccatgtaagagttggataattgaatctgatgttcataagcaaataaccaaatcagatgattattaggtgac

SEQ ID NO: 459 - protein, 138 aa, Musa acuminata
  misc_feature: Ceres CLONE ID no.1713920
  misc_feature: Bit score of 371.2 for HMM based on sequences of FIGURE 1.
  misc_feature (19)..(135): Pfam Name: RNA_pol_Rpb4 Pfam Description: RNA polymerase Rpb4
  misc_feature: Functional Homolog Of Ceres SEEDLINE ID no. ME00029 at SEQ ID NO. 442
MSGEEEENAAELKIGEEFLKAKCLMNCEVARILDHKYDQLQQTSDDPTNQISQVFEKSMQYVKRFSRYKNPDAVRQVREVLSRYKLAEFELCVLGNLCPETVEEAIAIVPSIKSKGRMLEDDAIEKMLHDLSLIKKFE

SEQ ID NO: 460 - DNA, 495 bp, Populus balsamifera subsp. trichocarpa
  misc_feature: Ceres ANNOT ID no.1456550
  misc_feature: Encodes the peptide sequence at SEQ ID NO 461
atggaagcatggcttatttttgtcttgattgcaatgaaatatagattcacttttcaaccccaaatcgatcatcccaaactcagtcacacagtctctctaaaggaaaaacctgaaaagaatagtctaagtatgtctggagaagaggaagagaatgcggccgagctcaaaatcggagatgattttttgaaggccaagtgcttaatgaattgtgaggttgctttaattcttgagcataagtatgagcagcttcaacagatgtctgatgatcctatgaatcaagtatcccaagtatttgagaaatcactgcagtatgtgaagcgctttagccgctacaaaaatcccgatgctctttgtgttcttggcaacctttgtcctgaaacagtggaggaagctattgccatggtaccttctatcaagaccaaaggccgagctcatgatgatgaagcaatcgaaaaaatgctgaatgacctgtccttgatcaagaaatttgaatag

SEQ ID NO: 461 - protein, 121 aa, Populus balsamifera subsp. trichocarpa
  misc_feature: Ceres ANNOT ID no.1456550
  misc_feature: Bit score of 301.6 for HMM based on sequences of FIGURE 1.
  misc_feature (19)..(118): Pfam Name: RNA_pol_Rpb4 Pfam Description: RNA polymerase Rpb4
  misc_feature: Functional Homolog Of Ceres SEEDLINE ID no. ME00029 at SEQ ID NO. 442
MSGEEEENAAELKIGDDFLKAKCLMNCEVALILEHKYEQLQQMSDDPMNQVSQVFEKSLQYVKRFSRYKNPDALCVLGNLCPETVEEAIAMVPSIKTKGRAHDDEAIEKMLNDLSLIKKFE

SEQ ID NO: 462 - DNA, 733 bp, Panicum virgatum
  misc_feature: Ceres CLONE ID no.1772747
  misc_feature: Encodes the peptide sequence at SEQ ID NO 463
atcgccgcgcttcccccaccaatcccttccgttgttgaatcgagtcgagtccaatcgcaggcagcagcaatccccaactccgtcgtcgtctccagcgatctcgctccgttcggaagcagcaagatgtccggcgaggaggaggagaacgccgccgagctcaagatcggagaagagttcctcaaggccaagtgcctgatgaactgcgaggtggccatcatcctggagcacaagttcgagcagatccagcagcacgcgtcggactcggacccctcgtcgcaggtgtcgcaggtgttcgagaagtcgctgcagtacgtgaagcgcttcagccgctacaagaaccccgacgccgtgcgccaggtccgcgagacgctcagccgctacggcctcgccgagttcgagctctgcaccatcggcaacctctgccccgacaccagcggcgaggccaccgcgctcgtcccttccctcaagtccgggggcaggttcgtcggcgaccaaggcgacgagaagatcgagaagatgctcaacgacctctccctcatcaagaagttcgagtagctgcctctagctgcttttgctattgtcatgacatggccgtgccttgttcagttggtccgtcaatttcccctagctgccttatatcttgtcacatcaggcgacaactcaagatcagtatgtaacttatttcctaatgattcatctttgtaactctcaacaaaaaaaaaaaaaaaaaaaa

SEQ ID NO: 463 - protein, 143 aa, Panicum virgatum
  misc_feature: Ceres CLONE ID no.1772747
  misc_feature: Bit score of 362.6 for HMM based on sequences of FIGURE 1.
  misc_feature (19)..(140): Pfam Name: RNA_pol_Rpb4 Pfam Description: RNA polymerase Rpb4
  misc_feature: Functional Homolog Of Ceres SEEDLINE ID no. ME00029 at SEQ ID NO. 442
MSGEEEENAAELKIGEEFLKAKCLMNCEVAIILEHKFEQIQQHASDSDPSSQVSQVFEKSLQYVKRFSRYKNPDAVRQVRETLSRYGLAEFELCTIGNLCPDTSGEATALVPSLKSGGRFVGDQGDEKIEKMLNDLSLIKKFE

SEQ ID NO: 464 - DNA, 681 bp, Zea mays
  misc_feature: Ceres CLONE ID no.225960
  misc_feature: Encodes the peptide sequence at SEQ ID NO 465
aaatcgcaattcgcaattcccagccccattccccgtcgcccggtcggaagcaccaccagctaccagggatgtctggcgaggaggaggagaacgccgcggagctcaagatcggcgaagagttcctcaaggccaagtgcctgatgaactgcgaggtggcgatcatcctggagcacaagtacgagcagatccagcagcacgcgtcgtcggagtcggacccgtcgtcgcaggtgtcgcaggtgttcgagaagtcgctgcagtacgtgaagcgcttcagccgctacaagaaccccgacgccgtgcgccaggtccgcgagacgctgagccgctacggcctcgccgagttcgagctctgcacgctcggcaacctctgccccgacaccagcggcgaggccaccgcgctcgtcccctccctcaagtccggcggcaggttcgtcggcgaccccggggacgagaagatcgagaagatgctcaacgacctctccctcatcaagaagttcgagtagagcgggagcccccagggtccgtatctcccccctcttctcttcttttctcttggagtagcgagcatccagagaggaggggaattcaacatcaagacgatgtactgctaaaattttacttgccttactactatcgttgaggtttgcgtctgcgtattgattagaaccttgtttgatcgat

SEQ ID NO: 465 - protein, 144 aa, Zea mays
  misc_feature: Ceres CLONE ID no.225960
  misc_feature: Bit score of 363.5 for HMM based on sequences of FIGURE 1.
  misc_feature (19)..(141): Pfam Name: RNA_pol_Rpb4 Pfam Description: RNA polymerase Rpb4
  misc_feature: Functional Homolog Of Ceres SEEDLINE ID no. ME00029 at SEQ ID NO. 442
MSGEEEENAAELKIGEEFLKAKCLMNCEVAIILEHKYEQIQQHASSESDPSSQVSQVFEKSLQYVKRFSRYKNPDAVRQVRETLSRYGLAEFELCTLGNLCPDTSGEATALVPSLKSGGRFVGDPGDEKIEKMLNDLSLIKKFE

SEQ ID NO: 466 - DNA, 1221 bp, Populus balsamifera subsp. trichocarpa
  misc_feature: Ceres ANNOT ID no.1443434
  misc_feature: Encodes the peptide sequence at SEQ ID NO 467
atgacaaaccagaatgtggttgtgcctgatgccaaacagggtattgatatcaccatcgcaatggtgctgcccaagtctctgttttcacctgttgtgccaaagccattgcctgccgctcctggtgggtatttcacaataacccgaaagaggttctcgaagaagacagaaactggaggcaaaatcagttcctgggttgattctatgagggattcttcacctacccgtgtcaaatccaccacttctttatcagaaactgaagagaaaaattcttggattgtaaaccatccttctgctctgaacatgtttgagcaaatagtgaaaggctcaaagggaaagcagattgtgatgttccttgattatgatggtacactgtcacccattgttgaagatcctgacagagcattcatgaccaatgagatgagagaagctgtcagggacgttgctagatactttcccacggctatagtgacgggaaggtgtagaaaaaaggtatctcttgcggctgctgctgttgttattttgaaagtgtatagctttgtaagattggcagggctttattatgctggtagccatggcatggacatcaagggaccatccaaaaataattgcaaatacgaaaaaggtggtgtactctttcaacctgccagtgaatttttacccatgattgatgaggtgtacaatgtcttgttggagagaacaaaatctatcccaggagctaaagtagaaaacaacaaattttgcgtatccgtacactttcgatgtgttgaggaaaagatgtgggctatattagtagagcaagtccgatcagttctcaatgattatcccaagcttagattaactcaagggaggaaggttttagagatccgacccaccattaaatgggacaagggcaaagctcttgaattcttgttagagtcattaggatatgccaattctactgacgtttttccggtctatattggagatgatcgaactgatgaggacgcattcaaggttctaagaaacagggggcaagggcttgggattcttgtttctaaagttcccaaggaaacaaatgcctcttattctctacaggaaccaaaagaggcaagttctttaatgttaaagacttcttacggcgattggtggagtggaagcgatcttcgttacaaggacaacgtagagcgtaaaaatatattagatcaagacccttgcctaaacgttggtcgagggtggccttga

SEQ ID NO: 467 - protein, 386 aa, Populus balsamifera subsp. trichocarpa
  misc_feature: Ceres ANNOT ID no.1443434
  misc_feature: Bit score of 594.2 for HMM based on sequences of FIGURE 9.
  misc_feature (97)..(341): Pfam Name: Trehalose_PPase Pfam Description: Trehalose-phosphatase
  misc_feature: Functional Homolog Of Ceres SEEDLINE ID no. ME20095 at SEQ ID NO. 1129
MVLPKSLFSPVVPKPLPAAPGGYFTITRKRFSKKTETGGKISSWVDSMRDSSPTRVKSTTSLSETEEKNSWIVNHPSALNMFEQIVKGSKGKQIVMFLDYDGTLSPIVEDPDRAFMTNEMREAVRDVARYFPTAIVTGRCRKKVSLAAAAVVILKVYSFVRLAGLYYAGSHGMDIKGPSKNNCKYEKGGVLFQPASEFLPMIDEVYNVLLERTKSIPGAKVENNKFCVSVHFRCVEEKMWAILVEQVRSVLNDYPKLRLTQGRKVLEIRPTIKWDKGKALEFLLESLGYANSTDVFPVYIGDDRTDEDAFKVLRNRGQGLGILVSKVPKETNASYSLQEPKEASSLMLKTSYGDWWSGSDLRYKDNVERKNILDQDPCLNVGRGWP

SEQ ID NO: 468 - DNA, 571 bp, Zea mays
  misc_feature: Ceres CLONE ID no.1437889
  misc_feature: Encodes the peptide sequence at SEQ ID NO 469
caatcgcaattcgcaattcccagccccattccccgtcgcccggtcggaagcaccaccagctaccagggatgtctggcgaggaggaggagaacgccgcggagctcaagatcggcgaagagttcctcaaggccaagtgcctgatgaactgcgaggtggcgatcatcctggagcacaagtacgagcagatccagcagcacgcgtcgtcggagtcggacccgtcgtcgcaggtgtcgcaggtgttcgagaagtcgctgcagtacgtgaagcgcttcagccgctacaagaaccccgacgccgtgcgccaggtccgcgagacgctgagccgctacggcctcgccgagttcgagctctgcacgctcggcaacctctgccccgacaccagcggcgaggccaccgcgctcgtcccctccctcaagtccggcggcaggttcgtcggcgaccccggggacgagaagatcgagaagatgctcaacgacctctccctcatcaagaagttcgagtagagcgggagccctctcttctcttatcttctcttctcttggagtagcgagcatccagagaggaggggaat

SEQ ID NO: 469 - protein, 144 aa, Zea mays; identical to SEQ ID NO: 465
  misc_feature: Ceres CLONE ID no.1437889
  misc_feature: Bit score of 363.5 for HMM based on sequences of FIGURE 1.
  misc_feature (19)..(141): Pfam Name: RNA_pol_Rpb4 Pfam Description: RNA polymerase Rpb4
  misc_feature: Functional Homolog Of Ceres SEEDLINE ID no. ME00029 at SEQ ID NO. 442

SEQ ID NO: 470 - protein, 142 aa, Oryza sativa subsp. japonica
  misc_feature: Public GI ID no.115443807
  misc_feature: Bit score of 368.7 for HMM based on sequences of FIGURE 1.
  misc_feature (19)..(139): Pfam Name: RNA_pol_Rpb4 Pfam Description: RNA polymerase Rpb4
  misc_feature: Functional Homolog Of Ceres SEEDLINE ID no. ME00029 at SEQ ID NO. 442
MSGEEEENAAELKIGEEFLKAKCLMNCEVAIILEHKYEQIQHMSDGDPSSQVSQVFEKSLQYVKRFSRYKNPDAVRQVRETLSRYGLAEFELCTLGNLCPDTSDEASALVPSLRSGGRFVGDPGSEKIDKMLNDLSLIKKFE

SEQ ID NO: 471 - DNA, 555 bp, Panicum virgatum
  misc_feature: Ceres CLONE ID no.2014249
  misc_feature: Encodes the peptide sequence at SEQ ID NO 472
gttcaatcgagtcgagtccaatcgcatcgcagcaattccaactccggcgatctcgctccggtcggaagcagcaagatgtccggcgaggaggaggagaacgccgccgagctcaagatcggagaagagttcctcaaggccaagtgcctgatgaactgcgaggtggccatcatcctggagcacaagtacgagcagatccagcagcacgcgtcggactcggacccctcgtcgcaggtgtcgcaggtgttcgagaagtcgctgcagtacgtcaagcgcttcagccgctacaagaaccccgacgccgtgcgccaggtccgcgagacgctcagccgctacggcctcgccgagttcgagctctgcaccatcggcaacctctgccccgacaccagcggcgaggccaccgcgctcgtcccttccctcaagtccgggggcaggttcgacggcgacgccggcgacgagaagatgctcaacgacctctccctcatcaagaagttcgagtagccagctctagtgccatctgccgcagtcttgctatattgccatggccatgccttttgt

SEQ ID NO: 472 - protein, 140 aa, Panicum virgatum
  misc_feature: Ceres CLONE ID no.2014249
  misc_feature: Bit score of 357.6 for HMM based on sequences of FIGURE 1.
  misc_feature (19)..(137): Pfam Name: RNA_pol_Rpb4 Pfam Description: RNA polymerase Rpb4
  misc_feature: Functional Homolog Of Ceres SEEDLINE ID no. ME00029 at SEQ ID NO. 442
MSGEEEENAAELKIGEEFLKAKCLMNCEVAIILEHKYEQIQQHASDSDPSSQVSQVFEKSLQYVKRFSRYKNPDAVRQVRETLSRYGLAEFELCTIGNLCPDTSGEATALVPSLKSGGRFDGDAGDEKMLNDLSLIKKFE

SEQ ID NO: 473 - DNA, 685 bp, Panicum virgatum
  misc_feature: Ceres CLONE ID no.2033133
  misc_feature: Encodes the peptide sequence at SEQ ID NO 474
gagtcgagtccaatcgcaggcagcagcaatccccaactccgtcgtcgtctccagcgatctcgctccgttcggaagcagcaagatgtccggcgaggaggaggagaacgccgccgagctcaagatcggagaagagttcctcaaggccaagtgcctgatgaactgcgaggtggccatcatcctggagcacaagtacgagcagatccagcagcacgcgtcggactcggacccctcgtcgcaggtgtcgcaggtgttcgagaagtcgctgcagtacgtgaagcgcttcagccgctacaagaaccccgacgccgtgcgccaggtccgcgagacgctcagccgctacggcctcgccgagttcgagctctgcaccatcggcaacctctgccccgacaccagcggcgaggccaccgcgctcgtcccttccctcaagtccgggggcaggttcgtcggcgaccaaggcgacgagaagatcgagaagatgctcaacgacctctccctcatcaagaagttcgagtagctgcctctagctgccttatatcttgttcagttggtccgtcagtttcccctagctgccttatatcttgtcacatcaggcgacaactcaagatcagtatgtaacttatttcctaatgattcatctttgtaactctcaacaaaaagggcctttgatgatgttgctttcctgttc

SEQ ID NO: 474 - protein, 143 aa, Panicum virgatum
  misc_feature: Ceres CLONE ID no.2033133
  misc_feature: Bit score of 364.0 for HMM based on sequences of FIGURE 1.
  misc_feature (19)..(140): Pfam Name: RNA_pol_Rpb4 Pfam Description: RNA polymerase Rpb4
  misc_feature: Functional Homolog Of Ceres SEEDLINE ID no. ME00029 at SEQ ID NO. 442
MSGEEEENAAELKIGEEFLKAKCLMNCEVAIILEHKYEQIQQHASDSDPSSQVSQVFEKSLQYVKRFSRYKNPDAVRQVRETLSRYGLAEFELCTIGNLCPDTSGEATALVPSLKSGGRFVGDQGDEKIEKMLNDLSLIKKFE

SEQ ID NO: 475 - DNA, 461 bp, Glycine max
  misc_feature: Ceres CLONE ID no.707404
  misc_feature: Encodes the peptide sequence at SEQ ID NO 476
gaatctctcgttcgattcttggcattccacttctcgccctcgttctttttttgcgttttcttcttcttcttcttcttcttcttcttcttcttctcactttttacctaagattttgtggaacatgtccggggaagaggaagaaaacgccgcagagctcaaaattggagacgagtttttgaaggcaaagtgcttaatgaactgtgaagtttcattgattcttgagcacaagtatgagcagcttcaacagacatctgatgatcccatgaatcaaatttctcaggtatttgaaaagtcactgcagtatgtgaaacgtttcagtcgctataaaaatcctgatgctgtcagacaagttcgaaaaattctcgcaagatatcaattggctgagtttgagttgtgtgtccttggcaacctttgcccagaaactgtggaggaagctattgctatggttccatctatcaagt

SEQ ID NO: 476 - protein, 113 aa, Glycine max
  misc_feature: Ceres CLONE ID no.707404
  misc_feature: Bit score of 272.2 for HMM based on sequences of FIGURE 1.
  misc_feature (19)..(111): Pfam Name: RNA_pol_Rpb4 Pfam Description: RNA polymerase Rpb4
  misc_feature: Functional Homolog Of Ceres SEEDLINE ID no. ME00029 at SEQ ID NO. 442
MSGEEEENAAELKIGDEFLKAKCLMNCEVSLILEHKYEQLQQTSDDPMNQISQVFEKSLQYVKRFSRYKNPDAVRQVRKILARYQLAEFELCVLGNLCPETVEEAIAMVPSIK

SEQ ID NO: 477 - DNA, 854 bp, Panicum virgatum
  misc_feature: Ceres CLONE ID no.1770680
  misc_feature: Encodes the peptide sequence at SEQ ID NO 478
aatcgagtcgagtccaatcgcatcgcagcaattccaactccggcgatctcgctccggtcggaagcagcaagatgtccggcgaggaggaggagaacgccgccgagctcaagatcggagaagagttcctcaaggccaagtgcctgatgaactgcgaggtggccatcatcctggagcacaagtacgagcagatccagcggcacgcgtcggactcggacccctcgtcgcaggtgtcgcaggtgttcgagaagtcgctgcagtacgtcaagcgcttcagccgctacaagaaccccgacgccgtgcgccaggtccgcgagacgctcagccgctacggcctcgccgagttcgagctctgcaccatcggcaacctctgccccgacaccagcggcgaggccaccgcgctcgtcccttccctcaagtccgggggcaggttcgacggcgacgccggcgacgagaagatcgagaagatgctcaacgacctctccctcatcaagaagttcgagtagccagctctagtgccatctgccgcagtcttgctatattgccatggccatgccttttgttcacttggaccgtcagttcccctggctgccctgccttgtcacatcaggctccatgctaatgatcagcaatgattcatctttgtaactctgaacaaaaagcctccatgctgcgaatttgagaactcaagagagggcctttgatgatgatgttgctttccctgttctttggacgtctcataaaagtagcagtgctacatctattactgctggtatgaacatgaagcttaaaagggaacattccagatgaagatgtacttgaatttcttatcaaaaaaaaaaaaaaaaaaaaaaaaa

SEQ ID NO: 478 - protein, 143 aa, Panicum virgatum
  misc_feature: Ceres CLONE ID no.1770680
  misc_feature: Bit score of 362.3 for HMM based on sequences of FIGURE 1.
  misc_feature (19)..(140): Pfam Name: RNA_pol_Rpb4 Pfam Description: RNA polymerase Rpb4
  misc_feature: Functional Homolog Of Ceres SEEDLINE ID no. ME00029 at SEQ ID NO. 442
MSGEEEENAAELKIGEEFLKAKCLMNCEVAIILEHKYEQIQRHASDSDPSSQVSQVFEKSLQYVKRFSRYKNPDAVRQVRETLSRYGLAEFELCTIGNLCPDTSGEATALVPSLKSGGRFDGDAGDEKIEKMLNDLSLIKKFE

SEQ ID NO: 479 - DNA, 432 bp, Populus balsamifera subsp. trichocarpa
  misc_feature: Ceres ANNOT ID no.1450989
  misc_feature: Encodes the peptide sequence at SEQ ID NO 480
atgtcaggagaagaggaagagaatgcggccgagctcaaaatcggagatgattttttgaaagccaagtgcttaatgaattgtgaagttgctttaattcttgagcataagtatgagcagcttcaacagatgtctgatgatcctatgaatcaagtatcccagtttagtttaaatcatgaatgtaggaactgggaggtctttgatgcaatgttttggagagtatttgagaaatcactgcagtatgtgaaacgctttagtcgctataaaaatcccgatgctgtcagacaactttgtgttcttggcaacctttgcccggaaacagtcgaggaagctattgccatggtaccttctatcaagaccaaaggccgagctcacgatgatgaagcaattgagaaaatgttgaatgacctgtcattgatcaagaaattcgaatag

SEQ ID NO: 480 - protein, 143 aa, Populus balsamifera subsp. trichocarpa
  misc_feature: Ceres ANNOT ID no.1450989
  misc_feature: Bit score of 288.8 for HMM based on sequences of FIGURE 1.
  misc_feature (19)..(140): Pfam Name: RNA_pol_Rpb4 Pfam Description: RNA polymerase Rpb4
  misc_feature: Functional Homolog Of Ceres SEEDLINE ID no. ME00029 at SEQ ID NO. 442
MSGEEEENAAELKIGDDFLKAKCLMNCEVALILEHKYEQLQQMSDDPMNQVSQFSLNHECRNWEVFDAMFWRVFEKSLQYVKRFSRYKNPDAVRQLCVLGNLCPETVEEAIAMVPSIKTKGRAHDDEAIEKMLNDLSLIKKFE

SEQ ID NO: 481 - protein, 128 aa, Brassica rapa subsp. pekinensis
  misc_feature: Public GI ID no.72384445
  misc_feature: Bit score of 274.7 for HMM based on sequences of FIGURE 1.
  misc_feature (19)..(125): Pfam Name: RNA_pol_Rpb4 Pfam Description: RNA polymerase Rpb4
  misc_feature: Functional Homolog Of Ceres SEEDLINE ID no. ME00029 at SEQ ID NO. 442
MSGEEEENAAELKIGDEFLKAKCLMNCEVSLILEHKVFEKSLQYVKRFSRYKNPDAVRQHVYLNSSFHRILSRHQLTEFELCVLGNLCPETAEEAVAMVPSLKTKGRAHSDEAIEKMLNDLSLVKRFE

SEQ ID NO: 482 - DNA, 674 bp, Triticum aestivum
  misc_feature: Ceres CLONE ID no.569388
  misc_feature: Encodes the peptide sequence at SEQ ID NO 483
gagtttacccgacgccaccccctcttttctttcccccttcctcttcaactcccgtctcacctctcccgacgccgaaccgaatcgcagcagcggcagccggagaagaagagatcgagcgccagcagccatgtccggcatggaggaggaggagaacgccgccgagctcaagatcggcgaagagttcctgaaggccaagtgcctgatgaactgcgaggtggcgataatcctggagcacaagtgggagcagctgcagcacatgtcggacggcggcgccgaccaggtctcgcaggtcttcgagaagtcgcaggcctacgtcaagcgcttcagccgctacaagaaccccgacgcggtccgccaggtccgcgagacgctctcccgctacagcctcgtcgagttcgagctctgcaccctcgggaacctctgccccgacaccgccgacgaggccaaggcgctcgtcccctccctcgtccccggcggcaggttcgacagcgacgaccgggtcgacaagatgctcaacgacctctccctcatcaagaagttcgagtagtagcccccataatatgctcttcttgtcttcctccagtgatatgtttaagcttcagattatctccttttattgcgctatgatcataagacatcagtgtcagtctcaaatgaatggagttaattaaacc

SEQ ID NO: 483 - protein, 139 aa, Triticum aestivum
  misc_feature: Ceres CLONE ID no.569388
  misc_feature: Bit score of 362.0 for HMM based on sequences of FIGURE 1.
  misc_feature (20)..(136): Pfam Name: RNA_pol_Rpb4 Pfam Description: RNA polymerase Rpb4
  misc_feature: Functional Homolog Of Ceres SEEDLINE ID no. ME00029 at SEQ ID NO. 442
MSGMEEEENAAELKIGEEFLKAKCLMNCEVAIILEHKWEQLQHMSDGGADQVSQVFEKSQAYVKRFSRYKNPDAVRQVRETLSRYSLVEFELCTLGNLCPDTADEAKALVPSLVPGGRFDSDDRVDKMLNDLSLIKKFE

SEQ ID NO: 484 - DNA, 821 bp, Glycine max
  misc_feature: Ceres CLONE ID no.1059299
  misc_feature: Encodes the peptide sequence at SEQ ID NO 485
ccccttcctcttcccctccccccatctcctcccccgacgccgaaccgaatcgccgcagcagccgccggagaagaacaaattgagcgccagcagccatgtccggcgtggaggaggaggagaacgccgccgagctcaagatcggcgaagagttcctcaaggccaagtgcctgatgaactgcgaggtggcgataatcctggagcacaagtgggagcagctgcagcacatgtcggacggcggcgccgaccaggtctcgcaggtgttcgagaagtcgcaggcctacgtcaagcgcttcagccgctacaagaaccccgacgcggtccgccaggtccgcgagacgctctcccgctacagcctcgtcgagttcgagctctgcaccctggggaacctctgccccgacaccgccgacgaggccaaggcgctcgtcccctccctcgtccccggcggcaggttcgacagcgacgaccgcgtcgacaagatgctcaacgacctctccctcatcaagaagttcgagtagctcttcttgtgttcctccaatggacatgatggacatggagaccatgtgtcatttatcagtctcaagaagtacttactagctactagtagcctagtttggtgatatgtttaatcttcagattatctcctcctatgctatgatcataaagcatcagcagtgtcaatctcaaatgtatggagttgattaaaccttgttgttatgctgtcttggagaaaaatgtagcagcttcttgttggagatatatggagtttacgctcctatatgctatgactataagacggagttgattaaacatttgttgatatc

SEQ ID NO: 485 - protein, 139 aa, Glycine max
  misc_feature: Ceres CLONE ID no.1059299
  misc_feature: Bit score of 360.3 for HMM based on sequences of FIGURE 1.
  misc_feature (20)..(136): Pfam Name: RNA_pol_Rpb4 Pfam Description: RNA polymerase Rpb4
  misc_feature: Functional Homolog Of Ceres SEEDLINE ID no. ME00029 at SEQ ID NO. 442
MSGVEEEENAAELKIGEEFLKAKCLMNCEVAIILEHKWEQLQHMSDGGADQVSQVFEKSQAYVKRFSRYKNPDAVRQVRETLSRYSLVEFELCTLGNLCPDTADEAKALVPSLVPGGRFDSDDRVDKMLNDLSLIKKFE

SEQ ID NO: 486 - DNA, 432 bp, Sorghum bicolor
  misc_feature: Ceres ANNOT ID no.6008086
  misc_feature: Encodes the peptide sequence at SEQ ID NO 487
atgtccggcgaggaggaggagaacgccgcggagctcaagatcggcgaagagtttctcaaggccaagtgcctgatgaactgcgaggtggcgatcatcctggagcacaagtacgagcagatccagcagcactcgtcggagtcggacccgtcgtcgcaggtgtcgcaggtgttcgagaagtcgctgcagtacgtgaagcgcttcagccgctacaagaaccccgacgccgtgcgccaggtccgcgagacgctcagccgctacggactcgccgagttcgagctctgcacgctcggcaacctctgccccgacaccagcggcgaggccaccgcgctcgtcccgtccctcaagtccggcggcaggttcgtcggagacgccagggacgagaagatcgagaagatgctcaacgacctctccctcatcaagaagttcgagtag

SEQ ID NO: 487 - protein, 143 aa, Sorghum bicolor
  misc_feature: Ceres ANNOT ID no.6008086
  misc_feature: Bit score of 364.1 for HMM based on sequences of FIGURE 1.
  misc_feature (19)..(140): Pfam Name: RNA_pol_Rpb4 Pfam Description: RNA polymerase Rpb4
  misc_feature: Functional Homolog Of Ceres SEEDLINE ID no. ME00029 at SEQ ID NO. 442
MSGEEEENAAELKIGEEFLKAKCLMNCEVAIILEHKYEQIQQHSSESDPSSQVSQVFEKSLQYVKRFSRYKNPDAVRQVRETLSRYGLAEFELCTLGNLCPDTSGEATALVPSLKSGGRFVGDARDEKIEKMLNDLSLIKKFE

SEQ ID NO: 488 - DNA, 1463 bp, Arabidopsis thaliana
  misc_feature: Ceres SEEDLINE ID no.ME00045
  misc_feature: Encodes the peptide sequence at SEQ ID NO. 489
ccggcgacacttcccttgcttctccctcttaggactctctctacgaatctgtaagcttcaaattcttacgccacactccgagattcgcttctgattattgtatgaatttttgagctccaaggatccactgccatgtatttatgctgctaaagcttgaaggcagtagttgaatcaccattaagttctttgctttgtaatttagcttgatttgagaataaacaaatgggaaaagcatcaggcttgcttctgtttctcttgggttttgggttctttgttgtcacatataatcttctgacacttatagttcacaatagatctggtgtgagtaattcagatggaagtccacttctggatcctgttgttcagatgcctctaaatattaggaaagccaagagttctccagcaccttttcatgttgccttaacagctacagatgcaccttataataagtggcagtgtcgtattatgtattattggtataagcagaagaaagctcttcctggttctgatatgggtggcttcacccgtattttgcattccggtaattctgataacttgatggatgaaatacccacatttgtggttgatcctcttcctccaggtcttgatcgggggtatgttgtcttgaatagaccatgggcattcgtgcaatggcttgaaagagctaccatcaaggaagactatgtgctcatggcagagcctgatcatgtatttgttaatccccttcccaatttggctgttggaggattcccagccgcttttccgtttttctatattactcctgaaaagtatgaaaacatagtcagaaagtattatccagcggagatggggccagtaacaaatatcgaccccattggcaactctcctgttatcataagcaaggaatcacttgaaaagattgctcctacatggatgaatgtctcgctgacaatgaaaaacgatccagaaactgataaggcatttggatgggtgctggaaatgtacggttacgcaattgcatctgctatacatggggtgcgtcacatacttcggaaggatttcatgcttcagcctccgtgggatttgtctaccaaggggaagtttatcattcattacacttatggatgcgactacaacatgaagggggagctgacatatggcaaaataggagagtggcgattcgataagagatcacatttgcggggtcctcctccaaggaacatgtccttgccgcctcccggtgttcccgaaagtgtggtgacacttgtgaagatggtgaatgaagctactgcgactatccctaattgggacactctctaactcacatccacacacaaaacacaaaccatagggacaaatccatacagcaacaatattttgcctaatttttttttccttctccctttacttccctgtctgttttttcttgtaatggttaaattatgaacttgagtagtaaattacaaaattatttgtttgacacc

SEQ ID NO: 489 - protein, 358 aa, Arabidopsis thaliana
  misc_feature: Ceres SEEDLINE ID no.ME00045
  misc_feature: Bit score of 930.3 for HMM based on sequences of FIGURE 2.
MGKASGLLLFLLGFGFFVVTYNLLTLIVHNRSGVSNSDGSPLLDPVVQMPLNIRKAKSSPAPFHVALTATDAPYNKWQCRIMYYWYKQKKALPGSDMGGFTRILHSGNSDNLMDEIPTFVVDPLPPGLDRGYVVLNRPWAFVQWLERATIKEDYVLMAEPDHVFVNPLPNLAVGGFPAAFPFFYITPEKYENIVRKYYPAEMGPVTNIDPIGNSPVIISKESLEKIAPTWMNVSLTMKNDPETDKAFGWVLEMYGYAIASAIHGVRHILRKDFMLQPPWDLSTKGKFIIHYTYGCDYNMKGELTYGKIGEWRFDKRSHLRGPPPRNMSLPPPGVPESVVTLVKMVNEATATIPNWDTL

SEQ ID NO: 490 - protein, 416 aa, Vitis vinifera
  misc_feature: Public GI ID no.147844794
  misc_feature: Bit score of 796.2 for HMM based on sequences of FIGURE 2.
  misc_feature: Functional Homolog Of Ceres SEEDLINE ID no. ME00045 at SEQ ID NO. 489
MARISPLFLVVLSLGFFFATYNLLTMTIHNRATGTLVVDESDHRLLSDPIIEMPENVRKPKNAKLPFHIALTATDAPYSKWQCRIMYYWYKKKKDLPGSEMGGFTRILHSGSPDNLMEEIPTFVVDPLPAGLDRGADVVIPTFVFLNGLGYIVLNRPWAFVQWLEKATIEEEYILMAEPDHIFIKPLPNLAHGDYPAAYPFFYIKPVQNEKIIRKFYPEEHGPVTNVDPIGNSPVIIKRMMMMLAFYFVLTFSGGTGVVGEDCAYMDEFSVSLRMKDDPETDKVFGWVLEMYAYAVASALHGVQHILQKDFMLQPPWDLETAKKFIIHYTYGCDYNLKGELTYGKIGEWRFDKRSYLRGPPPRNLSLPPPGVPESVLDSWSYNSLTPYRAQDKLRKVTLVKMVNEATANLPRWDTQ

SEQ ID NO: 491 - protein, 198 aa, Vitis vinifera
  misc_feature: Public GI ID no.147842279
  misc_feature: Bit score of 261.3 for HMM based on sequences of FIGURE 2.
  misc_feature: Functional Homolog Of Ceres SEEDLINE ID no. ME00045 at SEQ ID NO. 489
MAEPDHIFVNPLPNLAHGGHPAGFPFFYIKPADNEKIIRKFYPKEKGPVTDVDPIGNSPVIIEKSQLEEIAPTWMNISLRMKDDPETDKAFGWVLEMYAYAVASALHGVQHILRKDFMLQPPWDLEVGKKFIIHYTYGCDYNLKGELTYGKIGEWRFDKRSFLSGPPPKNLTLPPPGVPEKCAQFISFLASFCMDCKL

SEQ ID NO: 492 - protein, 318 aa, Ostreococcus lucimarinus CCE9901
  misc_feature: Public GI ID no.145355441
  misc_feature: Bit score of 331.8 for HMM based on sequences of FIGURE 2.
  misc_feature: Functional Homolog Of Ceres SEEDLINE ID no. ME00045 at SEQ ID NO. 489
MRGDPDPSRKFHVVMTTNNAVYQGWQARVMYYHFQKQKAAQGPNGQMGGFTRVLHDVADGLEDEIPTCIVDRLEDELGFVVLSRPFAFVQFFEKCPQIEEDFILMAEPDHLYIKPVPNLMRGDTPAAFPFFYINPKEKPDIVRRFLPGITDEEMKDIDGIGSSPVFIRKDDLERLAPAWAEMSVALQKDKDAKAAWGWVIEMYGYTLAAYKLGISHDLRPQMAAQPPWDKAVGDFISIHFTYGMDYDLDGVFTPGKIGAWRFDKRSYSHAYPPKKIPDPPKGMNNDLVRALVDAVNEASAALPDWGKWGTENVIAGFN

SEQ ID NO: 493 - DNA, 1630 bp, Glycine max
  misc_feature: Ceres CLONE ID no.571200
  misc_feature: Encodes the peptide sequence at SEQ ID NO 494
agggaagaaccactaccaaacttcaactcactttctctctctcattctccctctctctcaccccctccgatctataaatcattctctctctctctctctctctcttacttacaaagtaaagagtagagtttgttctgtgaagaactgagggaggttcaggtccatgatattttgaaatctctctgtagtaggaagaccatgggacgagcttcatcattacttataatttttttggttcttggttcttcctttgccacctataatgtggtaacgatgataaggcactacggatcttcagaaggtgtggctgttaatgatggtgcattgttttttgaccctattactgagatgcctgatcatgtaaagaatcggaagacatctaaagtgccctttcatgtcgcgttaacggcgacggatgctccatataacaaatggcagtgccgcgtcatgtattactggtataaacaacaaaagaagttacctgggtctgagatgggaggattcacgaggattctacattctggaaatcctgacaacttgatggatgaaattcctactgttgtggttgatccccttccagcaggtttggatcggggatacattgttctgaataggccatgggcctttgttcagtggctggaaaagactaaaatagaggaagaatatgtgttaatggcagagcccgatcacatatttgtgcgtcctctgcccaatctggcctatggaggacatccggctgcttttccatttttttacattagacctgatgagaatgaaaaaatcataaggaagttttatcctgaggagctgggaccagttacaaatgttgatccaattggaaattcgcctgtaattataagaaaggatttgattgcaaagattgcccccacatggatgaatatttctttgaagatgaaagaggatccagagactgataaagcttttggatgggtgctagaaatgtatgcttatgctgttgcatctgctctgcatggtgtgaggcacattctgcggaaagacttcatgctgcagcccccatgggatcttgaaactaacaagaagtacattatacattacacttacggatgtgactacaatatgaagggtgaattgacttatggcaaagttggtgaatggagatttgacaaaaggtcgcatctacgaggacctccaccaaaaaacttgcccctgcccccaccaggggttcctgaaagtgtggtaacccttgtaaagatggtgaacgaggctagtgctaacatcccaaattgggacacatcgtaaatattttccacctcatcatgatgatatcccaagtgcacattttaaaaagaaaaaaaattgacaatgagtctttttttttttttttttatcacgagtttagtcttattagatggatagatgaatgtaagcaataccattttatatgacaattaaatacaggataaatatttatatttttttttcttgttggtgatatttttgaatggtatttgggctcgtaccacaatggctgatactttgttcattaagtattggcttcgaaattgcttatgtatatgttagacaattcttgtattgtatgccatgcatagccctagacaacataataattgtttctcttcatttctac

SEQ ID NO: 494 - protein, 360 aa, Glycine max
  misc_feature: Ceres CLONE ID no.571200
  misc_feature: Bit score of 937.8 for HMM based on sequences of FIGURE 2.
  misc_feature: Functional Homolog Of Ceres SEEDLINE ID no. ME00045 at SEQ ID NO. 489
MGRASSLLIIFLVLGSSFATYNVVTMIRHYGSSEGVAVNDGALFFDPITEMPDHVKNRKTSKVPFHVALTATDAPYNKWQCRVMYYWYKQQKKLPGSEMGGFTRILHSGNPDNLMDEIPTVVVDPLPAGLDRGYIVLNRPWAFVQWLEKTKIEEEYVLMAEPDHIFVRPLPNLAYGGHPAAFPFFYIRPDENEKIIRKFYPEELGPVTNVDPIGNSPVIIRKDLIAKIAPTWMNISLKMKEDPETDKAFGWVLEMYAYAVASALHGVRHILRKDFMLQPPWDLETNKKYIIHYTYGCDYNMKGELTYGKVGEWRFDKRSHLRGPPPKNLPLPPPGVPESVVTLVKMVNEASANIPNWDTS

SEQ ID NO: 495 - DNA, 1515 bp, Gossypium hirsutum
  misc_feature: Ceres CLONE ID no.1928532
  misc_feature: Encodes the peptide sequence at SEQ ID NO 496
acaaaatctctctcagataactgtctcaagatttccttgatctccatcctttctggtaattcttggagcttgcattctcctgttagtgtactccaactaatggtgtagtggcttttttccattgtcaaccggtgtgggcgtttttgcggtgtagagctcgtttttaagcagtttggactttggaggatcggagatcgtggtcgatgatatcgagaaagaacatgggaagtgcttcgccgctcctactcattacattagttcttggtgtttgctttgccacatataatcttgtaacaatggtaatgcacaatagatctatttcaaaactgacaatctataactccgatggtggaatatttgttgatcccatcattgagatgcccgaaagtgtgaggaaattgaagcgtgccaaaatgcctttccatgttgccttaactgccactgatgctccctacagcaaatggcagtgtcgtatcatgtactattggtataagaagcagaaggacttacctgggtcggagatgggaggtttcactcgtattttacactctggaaatcctgacaatttgatgaacgagattcctactgtcatagtcgatcctcttccagcagggcttgatcggggatacatcgtcttaaatcgaccatgggcttttgtgcaatggctggaaaaggctacaattgaagaagaatacgtattgatggcagagcctgaccacatttttgtcactcccctacctaatctagcacatggaggatacccggctgcattcccctttttctacattaagccggatcagaacgaaaagttgttaaggaagtttttcccggaggagatgggaccggtgacaaatattgatccaatcggcaattcacccgtcattatcaagaaggaattattggaaaaaatcgctcctacttggatgaatgtttctttaaaaatgaaggatgatcccgagactgataaaacttttggatgggtgctagaaatgtatgcttatgctgtggcatcggctttgcatggcgtgcaacatgtacttcaaaaagacttcatgcttcagcaaccgtgggatctggaagtagggaaaaagtacataattcattacacctatggatgtgactacaacatgaagggtgagttaacatatggtaaaatcggtgagtggcgatttgacaagagatcgtttctacgaggaccaccaccacgaaatctccccttgcctcctccaggggtcccagaaagcgtggtgacgcttgtgaagatggtgaacgaagcaacggctaacattccaaactgggatgcggaataaacgtccgataataggttaaggaaggaaaattgaagtaggaatataccctttagctgaattgaaacatgaaagaaatatgaagttgtaatagtgtgataaagcatttaacaaattttttttgaagaggaaaagagttgaatatcaatacggtttgtgaaatagagatgacaaaaactctttgctacatgaattaagtttgaacgtt

SEQ ID NO: 496 - protein, 368 aa, Gossypium hirsutum
  misc_feature: Ceres CLONE ID no.1928532
  misc_feature: Bit score of 946.6 for HMM based on sequences of FIGURE 2.
  misc_feature: Functional Homolog Of Ceres SEEDLINE ID no. ME00045 at SEQ ID NO. 489
MISRKNMGSASPLLLITLVLGVCFATYNLVTMVMHNRSISKLTIYNSDGGIFVDPIIEMPESVRKLKRAKMPFHVALTATDAPYSKWQCRIMYYWYKKQKDLPGSEMGGFTRILHSGNPDNLMNEIPTVIVDPLPAGLDRGYIVLNRPWAFVQWLEKATIEEEYVLMAEPDHIFVTPLPNLAHGGYPAAFPFFYIKPDQNEKLLRKFFPEEMGPVTNIDPIGNSPVIIKKELLEKIAPTWMNVSLKMKDDPETDKTFGWVLEMYAYAVASALHGVQHVLQKDFMLQQPWDLEVGKKYIIHYTYGCDYNMKGELTYGKIGEWRFDKRSFLRGPPPRNLPLPPPGVPESVVTLVKMVNEATANIPNWDAE

SEQ ID NO: 497 - DNA, 1089 bp, Populus balsamifera subsp. trichocarpa
  misc_feature: Ceres ANNOT ID no.1490637
  misc_feature: Encodes the peptide sequence at SEQ ID NO 498
atgggacgggcttcgctgttagttctgattctattgactattggctttttctttgccacatataatttggttgccatgataatgcattatagatctattgggaaatgggcacatgacgattcggatggtcagatatttttggatccagttactgaaatgcctgaagacgtgaagaaagcaaagaatgccaaaatgcccttccatgttgctctaacagcaactgatgctccttacagcaaatggcagtgtcgcattatgtactactggtataagaagaagaaagacctgcccgggtcggagatgggaggctttacacggattttacactctggaaaacctgacaacttgatggatgagatccccacaactgtggttgatcctctgccagctggtcttgatcagggttacgttgtcctaaatagaccctgggcctttgtgcagtggctggaaaaggcttctatcgaggaagaatatattttaatggcagagcctgatcacgtatttataaatccccttccaaatttggcacgcggagggttgccagctgcttttccttttttctatatcaaacctgctgatcacgaaagcatcatacggaagtattatccggaggagaagggtcctgtgacaaacgttgatccaattggcaactctcctgtaattatcaagaaggaattgctggaaaagattgctcctacgtggatgaatatctccttgaaaatgaaaagagaccaggagactgataaagcttttggatgggtactagaaatgtatgcatatgctgtggcatcagctttacatgatgtgcagcacattcttcggaaagactttatggtgcagcctccatgggatttggcaacagggaagaattttatcattcattatacttatggatgtgactacaatttgaagggtgagctaacatatggaaaaattggagagtggcggtttgacaaaagatcatatctaggtggacctatgccaagaaatctcgccttgccccctcgaggggttccggaaagtgtggttacccttgtaaagatggtcaatgaagctactgcaaacattccaaattgggacacagaatag

SEQ ID NO: 498 - protein, 362 aa, Populus balsamifera subsp. trichocarpa
  misc_feature: Ceres ANNOT ID no.1490637
  misc_feature: Bit score of 944.0 for HMM based on sequences of FIGURE 2.
  misc_feature: Functional Homolog Of Ceres SEEDLINE ID no. ME00045 at SEQ ID NO. 489
MGRASLLVLILLTIGFFFATYNLVAMIMHYRSIGKWAHDDSDGQIFLDPVTEMPEDVKKAKNAKMPFHVALTATDAPYSKWQCRIMYYWYKKKKDLPGSEMGGFTRILHSGKPDNLMDEIPTTVVDPLPAGLDQGYVVLNRPWAFVQWLEKASIEEEYILMAEPDHVFINPLPNLARGGLPAAFPFFYIKPADHESIIRKYYPEEKGPVTNVDPIGNSPVIIKKELLEKIAPTWMNISLKMKRDQETDKAFGWVLEMYAYAVASALHDVQHILRKDFMVQPPWDLATGKNFIIHYTYGCDYNLKGELTYGKIGEWRFDKRSYLGGPMPRNLALPPRGVPESVVTLVKMVNEATANIPNWDTE

SEQ ID NO: 499 - DNA, 1083 bp, Populus balsamifera subsp. trichocarpa
  misc_feature: Ceres ANNOT ID no.1461381
  misc_feature: Encodes the peptide sequence at SEQ ID NO 500
atggggcgagcgtcgccattgctattggtgcttttggcactagggtttttctttgccacgtataacttgttgactttgataatacagtataaggattctagtacaggacttggatcagggatttctgatcctgttacagggatgccagccaattcttggaaattagggaagtcaaatttgaaattccatgttgctcttacggctactgatgctccttatagtcaatggcaatgccgggttatgtattattggtataagaaaatgaaaagcatgccaggatcagacatgggaaagttcactcgagttttgcattcggggaaaggtgatcatttgatggatgagattccaacttttattgttgatcctcttccagacggcctagatcggggatatattgtcttgaatagaccatgggcttttgtgcaatggctggaaaaggcaacaattgaggaagactacattctaatggcagagcctgaccacatattcgcaaatcctttgcctaacttggcacatggagataatccagcagggtttccatttttctatattaaaccaactgaacatgagaaaattgttagaaagttttatcctgaggagaagggtcctgtgacagatgttgatccaattggcaattcccctgtaataataaaaaagtccctgctggaggaaatttcgccaacatgggtgaatgtttcgttaagaatgaaagatgacccggagactgataaggcatttggttgggtgctagagatgtatgcctatgctgtagcatcagcattgcatggtgtacggcatatacttcgtaaagactttatgctacagcctccatgggatttggaagttggtaagagatttatcatccactatacttatggatgcgactataatatgaagggagaattaacatatggaaagattggagaatggcggtttgacaagagatcctatctcagtggtcctccaccaaagaacctcaccctgcccccaccaggagttcctgaaagcgtggtgagacttgtaaagatggtgaatgaggctacagctaacattccaggctgggactcattgaacagtggctga

SEQ ID NO: 500 - protein, 360 aa, Populus balsamifera subsp. trichocarpa
  misc_feature: Ceres ANNOT ID no.1461381
  misc_feature: Bit score of 874.5 for HMM based on sequences of FIGURE 2.
  misc_feature: Functional Homolog Of Ceres SEEDLINE ID no. ME00045 at SEQ ID NO. 489
MGRASPLLLVLLALGFFFATYNLLTLIIQYKDSSTGLGSGISDPVTGMPANSWKLGKSNLKFHVALTATDAPYSQWQCRVMYYWYKKMKSMPGSDMGKFTRVLHSGKGDHLMDEIPTFIVDPLPDGLDRGYIVLNRPWAFVQWLEKATIEEDYILMAEPDHIFANPLPNLAHGDNPAGFPFFYIKPTEHEKIVRKFYPEEKGPVTDVDPIGNSPVIIKKSLLEEISPTWVNVSLRMKDDPETDKAFGWVLEMYAYAVASALHGVRHILRKDFMLQPPWDLEVGKRFIIHYTYGCDYNMKGELTYGKIGEWRFDKRSYLSGPPPKNLTLPPPGVPESVVRLVKMVNEATANIPGWDSLNSG

SEQ ID NO: 501 - DNA, 1083 bp, Populus balsamifera subsp. trichocarpa
  misc_feature: Ceres ANNOT ID no.1440313
  misc_feature: Encodes the peptide sequence at SEQ ID NO 502
atggggcgagcgtcgccattgcttttggtgcttttggcactaggatttttctttgcgatgtataacttgttgactttggtaatacaatataaggattctagttcaggagctggatcagggaatcctgatcctgtaatacggatgccaaccaatttgaggaaattagggaagtcgaatttgaaattccatgttgcccttacggctactgatgctccttatagtcaatggcaatgccggattatgtattattggtataagaagatgaaaaacatgccaggatcagacatgggaaagtttactcgagtgttgcattcgggaaaaggtgatcatttgatggacgagattccaacttttgttgttgatcctcttccggagggcttagatcggggctatattgtcttaaatagaccgtgggcttttgtgcaatggctggaaaaagcaactattgaggaagaatacattctaatggcagaacctgaccacatatttgcaaatcctttgcctaacttggcacatggagataatccagcagggtttccatttttctatattaaaccaactgaacacgagaaaattgttcgaaagttttatcccgaggagaagggtcctgtgaccgacgttgatccaattggcaattctcccgtaataataaaaaagtcactgctggaggaaatttcaccaacatgggtgaatgtttcgctaagaatgaaagatgacccagagactgataaggcatttggttgggtgcttgaaatgtatgcctatgctgtagcatcagcattgcatggtgtgcggcatatactccatgaagactttatgctacagccaccatgggatttggaagttgggaagagatttattatccactacacttatggatgcgactacaatatgaagggagaattaacatatggaaagattggagaatggcggtttgacaagagatcctatctcagtggtcctccaccaaagaacatttccctgcccccaccaggagttcctgaaagtgtggtgagacttgtaacgatggttaatgaggctacagctaacatccctggctgggactcattaaacagtggctga

SEQ ID NO: 502 - protein, 360 aa, Populus balsamifera subsp. trichocarpa
  misc_feature: Ceres ANNOT ID no.1440313
  misc_feature: Bit score of 865.7 for HMM based on sequences of FIGURE 2.
  misc_feature: Functional Homolog Of Ceres SEEDLINE ID no. ME00045 at SEQ ID NO. 489
MGRASPLLLVLLALGFFFAMYNLLTLVIQYKDSSSGAGSGNPDPVIRMPTNLRKLGKSNLKFHVALTATDAPYSQWQCRIMYYWYKKMKNMPGSDMGKFTRVLHSGKGDHLMDEIPTFVVDPLPEGLDRGYIVLNRPWAFVQWLEKATIEEEYILMAEPDHIFANPLPNLAHGDNPAGFPFFYIKPTEHEKIVRKFYPEEKGPVTDVDPIGNSPVIIKKSLLEEISPTWVNVSLRMKDDPETDKAFGWVLEMYAYAVASALHGVRHILHEDFMLQPPWDLEVGKRFIIHYTYGCDYNMKGELTYGKIGEWRFDKRSYLSGPPPKNISLPPPGVPESVVRLVTMVNEATANIPGWDSLNSG

SEQ ID NO: 503 - DNA, 1176 bp, Populus balsamifera subsp. trichocarpa
  misc_feature: Ceres ANNOT ID no.1448275
  misc_feature: Encodes the peptide sequence at SEQ ID NO 504
atgggacaggcttcgtcaccagttctgattctattagcttttgggtttttctttgctacatacaacttagtcaccatgacaatgcacaatagatctattgggaaatgggtatatgacgattcggatggtgaggcatttttcgatccagttattgaaatgcctgaagaggtgaagaaaccaaagaatgccaggatgcccttccatgttgccttaacagcaactgatgctccctacagcaaatggcagtgtcgcattatgtactactggtataagaagaacagagacctgtctgggtcggagatgggaggatttacacggattttgcactctggaaagcctgacaacttgatggatgagatgcctacagttgtggttgatcctcttcctgcaggtctcgatcggggttacatcgtcctaaatagaccatgggcctttgtgcagtggctggaaaagactaccattgaggaagaatatatattaatggcagagcctgatcatatacttgtgaatccccttccaaatctagcacgtggagggttgccggctgcttttccatttttctatatcgaacctgctaaattcgaaaatatcgtaaggaagtattatccagaggagaagggtcctgtgacagatatcgatccaattggcaactctcctgtaattatcaagaagtttttctgttggatgaaagatgagttattatctgaaccttatgattttcaggaacttctggaaaagatagctcctaaatggatgaacgtttccttgaaaatgaaaaatgacaaggagactgataaagcttttggatgggtactagaaatgtttttgacactcctgtttttggtcgctgaactaaggtatgcatatgctgtggcagcagctttgaacgacgtgcagcatgttcttcggaaagattttatgctgcagcccccatgggatctgagcactaggaaattttttatcattcattatacttatggatgtgactacaacttaaagggtcagctaacatatggaaaaattggagagtggagatttgacaagagatcatatctacgagggcctccaccaaaaaacctccccttgccccctccaggggttccagaaagtgtggttaccctcgtaaagatggtcaatgaagctactgctaacattcctaattgggatgcagagtag

SEQ ID NO: 504 - protein, 391 aa, Populus balsamifera subsp. trichocarpa
  misc_feature: Ceres ANNOT ID no.1448275
  misc_feature: Bit score of 854.3 for HMM based on sequences of FIGURE 2.
  misc_feature: Functional Homolog Of Ceres SEEDLINE ID no. ME00045 at SEQ ID NO. 489
MGQASSPVLILLAFGFFFATYNLVTMTMHNRSIGKWVYDDSDGEAFFDPVIEMPEEVKKPKNARMPFHVALTATDAPYSKWQCRIMYYWYKKNRDLSGSEMGGFTRILHSGKPDNLMDEMPTVVVDPLPAGLDRGYIVLNRPWAFVQWLEKTTIEEEYILMAEPDHILVNPLPNLARGGLPAAFPFFYIEPAKFENIVRKYYPEEKGPVTDIDPIGNSPVIIKKFFCWMKDELLSEPYDFQELLEKIAPKWMNVSLKMKNDKETDKAFGWVLEMFLTLLFLVAELRYAYAVAAALNDVQHVLRKDFMLQPPWDLSTRKFFIIHYTYGCDYNLKGQLTYGKIGEWRFDKRSYLRGPPPKNLPLPPPGVPESVVTLVKMVNEATANIPNWDAE

SEQ ID NO: 505 - DNA, 1200 bp, Populus balsamifera subsp. trichocarpa
  misc_feature: Ceres ANNOT ID no.1437838
  misc_feature: Encodes the peptide sequence at SEQ ID NO 506
atgggacgggcttcgctgttagttctgattctattgactattggctttttctttgccacatataatttggttgccatgataatgcattatagatctattgggaaatgggcacatgacgattcggatggtcagatatttttggatccagttactgaaatgcctgaagacgtgaagaaagcaaagaatgccaaaatgcccttccatgttgctctaacagcaactgatgctccttacagcaaatggcagtgtcgcattatgtactactggtataagaagaagaaagacctgcccgggtcggagatgggaggctttacacggattttacactctggaaaacctgacaacttgatggatgagatccccacaactgtggttgatcctctgccagctggtcttgatcagggttacgttgtcctaaatagaccctgggcctttgtgcagtggctggaaaaggcttctatcgaggaagaatatattttaatggcagagcctgatcacgtatttataaatccccttccaaatttggcacgcggagggttgccagctgcttttccttttttctatatcaaacctgctgatcacgaaagcatcatacggaagtattatccggaggagaagggtcctgtgacaaacgttgatccaattggcaactctcctgtaattatcaagaagtggtatattctctgttggatgaaaaatgagagattatcagaactttatgatcttcaggaattgctggaaaagattgctcctacgtggatgaatatctccttgaaaatgaaaagagaccaggagactgataaagcttttggatgggtactagaaatgtatgcatatgctgtggcatcagctttacatgatgtgcagcacattcttcggaaagactttatggtgcagcctccatgggatttggcaacagggaagaattttatcattcattatacttatggatgtgactacaatttgaagggtgagctaacatatggaaaaattggagagtggcggtttgacaaaagatcatatctaggtggacctatgccaagaaatctcgccttgccccctcgaggggttccggaaagtgtgctggttctgacgggtctgagtcatattcttgttgcagcaaatagaagcatgaatgttacccttgtaaagatggtcaatgaagctactgcaaacattccaaattgggacacagaatag

SEQ ID NO: 506 - protein, 399 aa, Populus balsamifera subsp. trichocarpa
  misc_feature: Ceres ANNOT ID no.1437838
  misc_feature: Bit score of 887.7 for HMM based on sequences of FIGURE 2.
  misc_feature: Functional Homolog Of Ceres SEEDLINE ID no. ME00045 at SEQ ID NO. 489
MGRASLLVLILLTIGFFFATYNLVAMIMHYRSIGKWAHDDSDGQIFLDPVTEMPEDVKKAKNAKMPFHVALTATDAPYSKWQCRIMYYWYKKKKDLPGSEMGGFTRILHSGKPDNLMDEIPTTVVDPLPAGLDQGYVVLNRPWAFVQWLEKASIEEEYILMAEPDHVFINPLPNLARGGLPAAFPFFYIKPADHESIIRKYYPEEKGPVTNVDPIGNSPVIIKKWYILCWMKNERLSELYDLQELLEKIAPTWMNISLKMKRDQETDKAFGWVLEMYAYAVASALHDVQHILRKDFMVQPPWDLATGKNFIIHYTYGCDYNLKGELTYGKIGEWRFDKRSYLGGPMPRNLALPPRGVPESVLVLTGLSHILVAANRSMNVTLVKMVNEATANIPNWDTE

SEQ ID NO: 507 - DNA, 1038 bp, Populus balsamifera subsp. trichocarpa
  misc_feature: Ceres ANNOT ID no.1501275
  misc_feature: Encodes the peptide sequence at SEQ ID NO 508
atgggacaggcttcgtcaccagttctgattctattagcttttgggtttttctttgctacatacaacttagtcaccatgacaatgcacaatagatctattgggaaatgggtatatgacgattcggatggtgaggcatttttcgatccagttattgaaatgcctgaagaggtgaagaaaccaaagaatgccaggatgcccttccatgttgccttaacagcaactgatgctccctacagcaaatggcagtgtcgcattatgtactactggtataagaagaacagagacctgtctgggtcggagatgggaggatttacacggattttgcactctggaaagcctgacaacttgatggatgagatgcctacagttgtggttgatcctcttcctgcaggtctcgatcggggttacatcgtcctaaatagaccatgggcctttgtgcagtggctggaaaagactaccattgaggaagaatatatattaatggcagagcctgatcatatacttgtgaatccccttccaaatctagcacgtggagggttgccggctgcttttccatttttctatatcgaacctgctaaattcgaaaatatcgtaaggaagtattatccagaggagaagggtcctgtgacagatatcgatccaattggcaactctcctgtaattatcaagaaggaacttctggaaaagatagctcctaaatggatgaacgtttccttgaaaatgaaaaatgacaaggagactgataaagcttttggatggcatgttcttcggaaagattttatgctgcagcccccatgggatctgagcactaggaaattttttatcattcattatacttatggatgtgactacaacttaaagggtcagctaacatatggaaaaattggagagtggagatttgacaagagatcatatctacgagggcctccaccaaaaaacctccccttgccccctccaggggttccagaaagtgtggttaccctcgtaaagatggtcaatgaagctactgctaacattcctaattgggatgcagagtag

SEQ ID NO: 508 - protein, 345 aa, Populus balsamifera subsp. trichocarpa
  misc_feature: Ceres ANNOT ID no.1501275
  misc_feature: Bit score of 830.6 for HMM based on sequences of FIGURE 2.
  misc_feature: Functional Homolog Of Ceres SEEDLINE ID no. ME00045 at SEQ ID NO. 489
MGQASSPVLILLAFGFFFATYNLVTMTMHNRSIGKWVYDDSDGEAFFDPVIEMPEEVKKPKNARMPFHVALTATDAPYSKWQCRIMYYWYKKNRDLSGSEMGGFTRILHSGKPDNLMDEMPTVVVDPLPAGLDRGYIVLNRPWAFVQWLEKTTIEEEYILMAEPDHILVNPLPNLARGGLPAAFPFFYIEPAKFENIVRKYYPEEKGPVTDIDPIGNSPVIIKKELLEKIAPKWMNVSLKMKNDKETDKAFGWHVLRKDFMLQPPWDLSTRKFFIIHYTYGCDYNLKGQLTYGKIGEWRFDKRSYLRGPPPKNLPLPPPGVPESVVTLVKMVNEATANIPNWDAE

SEQ ID NO: 509 - DNA, 1669 bp, Glycine max
  misc_feature: Ceres CLONE ID no.1644562
  misc_feature: Encodes the peptide sequence at SEQ ID NO 510
gctgcttcaaacctccgcgttttctagtgccttgttgctacttacaccctattgttgaaaagtcaatcccccacaaatccctttttccacatccaccccttctccatttccttccttcaaaacattgcttacccttctcttttttcccccaaagtttcgttcttttgtatcttctctcattcaaagtttgagtcttccgcatttggggtgccctgaattgccgtgcaagttcagatctgcttacagaattcatatttgaatcggtgaagattttgaaaatgatcgtgagaaaaggcatggggcgagcaaagtcactgcttttgctgcttatggtgcttttgttttcctttgccacttataatttggtagctatgatcatggaccataaggcagatgggttggagtctttgaatagaaaaatgatggtatcgggaaagactaattcaaagtttcatgttgccgtgaccgcaaccgatgccgcttacaatcaatggcaatgccggattatgtactattggtataagaaagtgaaggacatgcctggatcagatatggggaaattcacccgtattttgcattctggaaggtcagaccagctgatggatgagattcctacttttgtggttgatccacttcctgagggcttggataagggttatattgtcctaaatagaccatgggcttttgttcagtggctggagaaagcagatattgaggaagaatatattctgatggcagaacctgaccacatatttgtaaagcctttgcctaatttggctcagggaaccctgcccgcagcatttccatttttctatataaaaccagatcagaatgaaaaaataatcaggaaattctatcctgaggaaaacggtcctgttactgatgttgatccaattggcaattctcctgtaatcattaagaagtctttgatggaggaaatagcttccacatgggtaaatgtttcattgagaatgaaagatgatcaagagactgataaagcttttggatgggtgcttgaaatgtatgcttatgctgtggcatctgcattgcatggtgtaaagcataatcttcgcaaagactttatgcttcagccaccttgggacttaaatgttgagaataagtttatcatccactatacatatggatgtgactataatatgaagggggaactgacatatgggaagattggagaatggcgttttgacaagaggtcttatcttttgggtcctccacccaaaaacctgcccttaccgcctccaggagttcctgaaagtgtggtgcggcttgttaaaatggtcaatgaggctactgcaaacatacctgaatgggattcattaaacaaaagctgagggaatgatgataaaccataaagccagtgattttgagatgaggactacaaataccatatcaaaaatagattagtttaagcaaataggagttgtgataaatacaaatgatgcttgtgctttctatgaaaatagatttttttttcttttaatggccaggaaattcttttacattcaaacgtatacaagacctttacaatctattacactgttgtagttttgcaaactgattgttatcatattgcaaccaatggaatggcatcttatcccttttgttttcccccacctttggtggatgaaactaaaaaaaaaaaaaaaaaaaa

SEQ ID NO: 510 - protein, 350 aa, Glycine max
  misc_feature: Ceres CLONE ID no.1644562
  misc_feature: Bit score of 820.2 for HMM based on sequences of FIGURE 2.
  misc_feature: Functional Homolog Of Ceres SEEDLINE ID no. ME00045 at SEQ ID NO. 489
MGRAKSLLLLLMVLLFSFATYNLVAMIMDHKADGLESLNRKMMVSGKTNSKFHVAVTATDAAYNQWQCRIMYYWYKKVKDMPGSDMGKFTRILHSGRSDQLMDEIPTFVVDPLPEGLDKGYIVLNRPWAFVQWLEKADIEEEYILMAEPDHIFVKPLPNLAQGTLPAAFPFFYIKPDQNEKIIRKFYPEENGPVTDVDPIGNSPVIIKKSLMEEIASTWVNVSLRMKDDQETDKAFGWVLEMYAYAVASALHGVKHNLRKDFMLQPPWDLNVENKFIIHYTYGCDYNMKGELTYGKIGEWRFDKRSYLLGPPPKNLPLPPPGVPESVVRLVKMVNEATANIPEWDSLNKS

SEQ ID NO: 511 - DNA, 2041 bp, Gossypium hirsutum
  misc_feature: Ceres CLONE ID no.1925967
  misc_feature: Encodes the peptide sequence at SEQ ID NO 512
gagcttagcggagaacaaaaacttgtcgcacatatggaaaaaaacagtggaaaccaaaccaaatactgacaactgacaagccaaaagcaaagatcttaccatcttaaaacataaaccacatcagttgtccaccaagtaggcccccattttttaattatactattgcttagaagcaatccaccctttccatcttgccaagacttccgcgttttccaccattgccgttgaatagaagaaactaaaccccaaatctctcccatgccttcagattctttctttggatttctgagggatttatgatcaattgtctgggatttttcagtaaagggtattcttacttgctgcaattctgtactgtcagcttccaattttcacggtttggtagattattgtgaattttttctccagatgttgttcgaaaagcataaattgaattaggcgttgcggctgtgagaagggctgggttttgtattgtgtagtgaaagatgaagcgcgtttcgccgctctttttggtacttttagtccttggattcttctttgcaacatataatttgttgactatgataatacactataagacatatacttcagagcaatgggatttctccaatccttttatacaaatgccttggaatttgatggaaggtgagggttctaactcaaagtaccacgttgctctcacggcaacagatgctccgtatagccaatggcagtgtcggattatgtattattggtataagaaggtaaaagagatgcctggatcagatatgggaaagttcactcgaattttgcattcagggaagcccgacaatttgatggaggagattccaacttttgtcgttgaccctcttccagagggtttagatcggggttatattgtcttaaatagaccatgggcttttgtgcaatggctggaaaaagcaatgattgacgaagaatacattctaatggccgaacctgaccatgtatttgtaaatcctttgcctaacttggctcgtggaaaacatccagcagggtttcctttcttttacattaagccatctgaccacaagcatgttattaggaagtattatcctgaggagaagggtcctgtgacgaatattgatccaattggcaattctccagtgattattaaaaagtctgtgctggagaaaattgcacctacatggatgaatatttctttgaggatgaaagatgacccagtgactgacaaggaatttggatgggtgctagaaatgtatgcgtatgctgtggcatctgcactgcatgacgtgcaccacatacttcataaagacttcatgctccagccaccatgggatacggaagtagggaagaagtttataatccattatacttacggatgtgactacaatttgaagggagaattaacatatggaaagattggagaatggcgtttcgataagagatcgtaccttagtgggcctcctccaaggaacctctctttgccccctccaggtgttcctgaaagtgtgttatcaactcaatgttgttgctgattggtgacataaagttggtgatattcgatgctggaagtactactgagtagcggcttggcactaatattctgctattgcctcaaaccataatagaaaaatcagtcaatcatcctatccagactgtttccccgagtcttgatgcctatttaaataaactcggcaaattaaatagtttctcaacataaacttttctagttgcaaacagtttctaatgtgatctttgcaatatctgcaggtgaaacttgtgaagatggtgaacgaagctacagaggatattcccaattgggatacactaaatcgtggctgagatctaatcttactaatctgcgcatccattttgacgctgttatcaatctgctttccaactagagttatggacatgaattacaaaggtagctgagacagcagtatacatagagaaaagggtatgtttacaagttaaaggagggatatatcatttttttacacttatatttataatcatgaaatgccttcttttgtgttaaaaaaaaaaaaaaaaaaaa

SEQ ID NO: 512 - protein, 343 aa, Gossypium hirsutum
  misc_feature: Ceres CLONE ID no.1925967
  misc_feature: Bit score of 776.1 for HMM based on sequences of FIGURE 2.
  misc_feature: Functional Homolog Of Ceres SEEDLINE ID no. ME00045 at SEQ ID NO. 489
MKRVSPLFLVLLVLGFFFATYNLLTMIIHYKTYTSEQWDFSNPFIQMPWNLMEGEGSNSKYHVALTATDAPYSQWQCRIMYYWYKKVKEMPGSDMGKFTRILHSGKPDNLMEEIPTFVVDPLPEGLDRGYIVLNRPWAFVQWLEKAMIDEEYILMAEPDHVFVNPLPNLARGKHPAGFPFFYIKPSDHKHVIRKYYPEEKGPVTNIDPIGNSPVIIKKSVLEKIAPTWMNISLRMKDDPVTDKEFGWVLEMYAYAVASALHDVHHILHKDFMLQPPWDTEVGKKFIIHYTYGCDYNLKGELTYGKIGEWRFDKRSYLSGPPPRNLSLPPPGVPESVLSTQCCC

SEQ ID NO: 513 - DNA, 1389 bp, Zea mays
  misc_feature: Ceres CLONE ID no.295496
  misc_feature: Encodes the peptide sequence at SEQ ID NO 514
agaatctctctttaagagggatacagagtaggaaagagacagagggggcaaagagcgatggacgccgcggtgcggaaggccgcgggcgccggcatcgcgcgcgcgccggcgctggtgctagcgctggtggcggcgggggcgttcctgatctcctacaacttcttcaccatgctgttccacggcggcggcggaataggcgcggcggcgaccgctgggacgagggaccctgtggtggccatgccagcgtggatgcgcgcggcggcggacaccgaggcgcggcggcggccgttccatgtggcgctcacggccacggacgcgccctacagccggtggcagtgccgggtcatgtacttctggtacaagcggatgcaggcgcggccgggcggagaggccatgggcgggttcacgcgcgtgctgcactcggggaagcccgacgggctcatggacgagatccccaccttcgtcgtcgacccgctgcccgctggcaaggaccacggatatgtggtcctaaataggccgtgggcatttgtgcagtggcttcagaaagcaaagattgaagaagagtatatactaatggcagaaccagaccatatatttgtgaaacctctaccaaatttggcccatgacgatgatccggcagcatttcccttcttttacattacaccatcagaacatgaaaaaattatcaggaaatactatgctaaagaaagaggtcctgtcacagatatcgatccgattgggaattctcctgtgataattaagaagacaattcttgagaagattgcccccacatggatgaatgtgtcaattcaaatgaaagaggatgaagaaacagataaagtttttggatgggtgttggaaatgtatgcatacgctgttgctagcgcattgcatggagttcatcatatccttcgtaaagatttcatgatccagccaccttttgatacaaagctccagaatacatttataatccacttcacttatggatgtgactactcactaaagggtgaactgacctatggtaaagttggtgaatggcgatttgacaaaagatcattcccagataggccaccaccaagaaatcttacattgccccctcctggagtaccagaaagtgtggttactctagtgaaaatggtcaatgaagctagtgcaaaccttcctcggtgggatgatggaatataaactttggatgatatcaattatatcttaggttcctttgatctgcccttgtatatggggaatatcaaagtatcaggtgcagtcggttgtttggtttacatccaaaatagctgcttgcacttgcacaccatacctgatagaagaagatacataattttctcagtgtactttttatgaaaagaaaagaaatgaaagtaaaagttagct

SEQ ID NO: 514 - protein, 375 aa, Zea mays
  misc_feature: Ceres CLONE ID no.295496
  misc_feature: Bit score of 911.5 for HMM based on sequences of FIGURE 2.
  misc_feature: Functional Homolog Of Ceres SEEDLINE ID no. ME00045 at SEQ ID NO. 489
MDAAVRKAAGAGIARAPALVLALVAAGAFLISYNFFTMLFHGGGGIGAAATAGTRDPVVAMPAWMRAAADTEARRRPFHVALTATDAPYSRWQCRVMYFWYKRMQARPGGEAMGGFTRVLHSGKPDGLMDEIPTFVVDPLPAGKDHGYVVLNRPWAFVQWLQKAKIEEEYILMAEPDHIFVKPLPNLAHDDDPAAFPFFYITPSEHEKIIRKYYAKERGPVTDIDPIGNSPVIIKKTILEKIAPTWMNVSIQMKEDEETDKVFGWVLEMYAYAVASALHGVHHILRKDFMIQPPFDTKLQNTFIIHFTYGCDYSLKGELTYGKVGEWRFDKRSFPDRPPPRNLTLPPPGVPESVVTLVKMVNEASANLPRWDDGI

SEQ ID NO: 515 - protein, 360 aa, Oryza sativa subsp. japonica
  misc_feature: Public GI ID no.115463637
  misc_feature: Bit score of 889.7 for HMM based on sequences of FIGURE 2.
  misc_feature: Functional Homolog Of Ceres SEEDLINE ID no. ME00045 at SEQ ID NO. 489
MSGRKNAGKASPFLLLLISVGCFFATYNFLTMVGHGRSRDAGPRKILGGVGGVGGGGSDPSKRFHVALTATDALYSQWQSRVMYYWYREMRDRPGSDMGGFTRILHSGKPDGLMDEIPTLVVDPLPEGADRGYIVLNRPWAFVQWLKKSNIKEDYVLMAEPDHIFVRPLPNLAHGDEPAAFPFFYIKPTENEIILRKFFPEENGPVSKIDPIGNSPVIIKKAQLEKIAPTWMNISLKMKEDVETDKAFGWVLEMYAYAVASALHGVHYSLRKDFMIQPPWDAKSDNTFIIHYTYGCDYTLKGELTYGKIGEWRFDKRSYLRSPPPRNLTLPPPGVPESVATLVKMVNEATANIPGWDEER

SEQ ID NO: 516 - protein, 372 aa, Oryza sativa subsp. japonica
  misc_feature: Public GI ID no.115435904
  misc_feature: Bit score of 859.1 for HMM based on sequences of FIGURE 2.
  misc_feature: Functional Homolog Of Ceres SEEDLINE ID no. ME00045 at SEQ ID NO. 489
MNAAARKAAAAARLPAAVLVVVAVGAFLISYNLLAIVLRGGGGAATGAGRERDPVVAMPGWMRAAGSAGGGRRRPFHVALTATDAAYSRWQCRVMYYWYKRMQARPEGADMGGFTRVLHSGKPDALMGEIPTFVVDPLPAGKDHGYVVLNRPWAFVQWLEKAKIEEEYILMAEPDHIFVRPLPNLARDDPAAFPFFYITPSEHESVLRKYYPKERGPVTNIDPIGNSPVIIKKIQLEKIAPTWMNVSIQMKEDQETDKAFGWVLEMYAYAVASALHGVQHILRKDFMIQPPFDTKLGNTFIIHFTYGCDYTLKGVLTYGKIGEWRFDKRAYQDRPPPRNLTLPPPGVPESVVTLVKMVNEATANLPGWDDGR

SEQ ID NO: 517 - DNA, 1853 bp, Panicum virgatum
  misc_feature: Ceres CLONE ID no.1999444
  misc_feature: Encodes the peptide sequence at SEQ ID NO 518
ggctgggattttgccttgttccccatgacggcgtcagcttaagcccttcctctcgctgctccctctccttccctgcatcgccgcggcggaggcccgcgagaccggccggcgatcgccgggcttgtcgcggtgggtgccctcgcctcgccctccccttcgccgccccctatcccctcccggcaatactctctcgcccgatcccttagcttcacccgcccgagggcgatcccaatcatcccagatccggcccgcgactcgccctgctctaccccactcccacggcagaggctcccaggtggctcccgcgatcggcccgcccgccagcgccgcctcgcgcggctcgacaggagtagcggcgcccccctccccctggttgcgggttgggggctcggctgtcgaggatgagcgggaggaagaatgccggcaggacctccccctggctgctcatcctcatctccgctgggtgcttcttcgcgacctacaacttcctgacgatgcacggccggggccgggacgggccgcgcaagctcctcgacggcgggggctcctacgggtcgcgctccggctccgacccggcgaagcggttccacgtcgcgctgacggcgacggacgcgctctacagccagtggcagtcccggatcatgcactactggtacaaggagatgagggaccgccccggctccgacatgggcggcttcacgcggatccttcactcggggaagcctgatgggttgatggatgagatacccaccatggtggtggaccctcttcctgaaggcaaggataagggatacattgtcttgaataggccgtgggcatttgtccagtggctgcagagagcaaaaattgacgaagactacatactaatggcggagccagatcatgtctttgtgaagcctttgccaaacttagctcatggtgatgaaccagcagcatttccatttttctacatcaatccaactgtgaatgagaagatattgcggaagttttttccagaggaaaaaggacctgtctcaaaaattgatcctatcggcaactctccagttataatcaagaaggcccaacttgagaagattgctccaacctggatgaatgtttcattaaaaatgaaagaggatcaggatacagacaaagcttttggatgggtcttggaaatgtatgcatatgctgttgctagtgcactgcatggtgtgcaccatagtctccgtaaagatttcatgattcagcctccttgggacctaaaaacagacaacacattcattatccattatacgtatggatgtgattatacaaatgagggtcagctaacttatgggaaaattggtgaatggcgttttgacaaaagatcttatcttgaatcaccaccaccaagaaatctttcactaccccctcctggagttcctgaaagtgtggtcactcttgtgaagatggtgaatgaggccactgcaaacattccagggtgggaggatgagagataatctgatggcctgatcagttgtagcttattttagctcctagctggtatggtttttgttggaaaacatagaggaataccacgggtgaataaaagaagagcgttcaattcatatctgaagtgtaggactgtggtcaattttctacagttcaacgtaggttagtgttcaggaagaaaaagatatattcactttgatctagtgagttgcatcattttttgtattgtaaagcagaaatatgggcttttggctacttttggttcatttagccgtgttgtaaatcagagatgtagtttagagtcctccaaccctgagaggtttgttattagtcatcttgggaaaagttctgctgggtgctgccaaaaaaaaaaaaaaaaaaaa

SEQ ID NO: 518 - protein, 358 aa, Panicum virgatum
  misc_feature: Ceres CLONE ID no.1999444
  misc_feature: Bit score of 896.6 for HMM based on sequences of FIGURE 2.
  misc_feature: Functional Homolog Of Ceres SEEDLINE ID no. ME00045 at SEQ ID NO. 489
MSGRKNAGRTSPWLLILISAGCFFATYNFLTMHGRGRDGPRKLLDGGGSYGSRSGSDPAKRFHVALTATDALYSQWQSRIMHYWYKEMRDRPGSDMGGFTRILHSGKPDGLMDEIPTMVVDPLPEGKDKGYIVLNRPWAFVQWLQRAKIDEDYILMAEPDHVFVKPLPNLAHGDEPAAFPFFYINPTVNEKILRKFFPEEKGPVSKIDPIGNSPVIIKKAQLEKIAPTWMNVSLKMKEDQDTDKAFGWVLEMYAYAVASALHGVHHSLRKDFMIQPPWDLKTDNTFIIHYTYGCDYTNEGQLTYGKIGEWRFDKRSYLESPPPRNLSLPPPGVPESVVTLVKMVNEATANIPGWEDER

SEQ ID NO: 519 - protein, 370 aa, Oryza sativa subsp. indica
  misc_feature: Public GI ID no.125552168
  misc_feature: Bit score of 868.2 for HMM based on sequences of FIGURE 2.
  misc_feature: Functional Homolog Of Ceres SEEDLINE ID no. ME00045 at SEQ ID NO. 489
MSGRKNAGKASPFLLLLISVGCFFATYNFLTMVGHGRSRDAGPRKILGGVGGVGGGGSDPSKRFHVALTATDALYSQWQSRVMYYWYREMRDRPGSDMGGFTRILHSGKPDGLMDEIPTLVVDPLPEGADRGYIVLNRPWAFVQWLKKSNIKEDICSYVLMAEPDHIFVRPLPNLAHGDEPAAFPFFYIKPTENEKILRKFFPEENGPVSKIDPIGNSPVIIKKAQLEKIAPTWMNISLKMKEDVETDKAFGWVLEMSVLLCVQYAYAVASALHGVHYSLRKDFMIQPPWDAKSDNTFIIHYTYGCDYTLKGELTYGKIGEWRFDKRSYLRSPPPRNLTLPPPGVPESVATLVKMVNEATANIPGWDEER

SEQ ID NO: 520 - protein, 370 aa, Oryza sativa subsp. japonica
  misc_feature: Public GI ID no.125594093
  misc_feature: Bit score of 866.2 for HMM based on sequences of FIGURE 2.
  misc_feature: Functional Homolog Of Ceres SEEDLINE ID no. ME00045 at SEQ ID NO. 489
MSGRKNAGKASPFLLLLISVGCFFATYNFLTMVGHGRSRDAGPRKILGGVGGVGGGGSDPSKRFHVALTATDALYSQWQSRVMYYWYREMRDRPGSDMGGFTRILHSGKPDGLMDEIPTLVVDPLPEGADRGYIVLNRPWAFVQWLKKSNIKEDICSYVLMAEPDHIFVRPLPNLAHGDEPAAFPFFYIKPTENEIILRKFFPEENGPVSKIDPIGNSPVIIKKAQLEKIAPTWMNISLKMKEDVETDKAFGWVLEMSVLLCVQYAYAVASALHGVHYSLRKDFMIQPPWDAKSDNTFIIHYTYGCDYTLKGELTYGKIGEWRFDKRSYLRSPPPRNLTLPPPGVPESVATLVKMVNEATANIPGWDEER

SEQ ID NO: 521 - DNA, 1452 bp, Zea mays
  misc_feature: Ceres CLONE ID no.221188
  misc_feature: Encodes the peptide sequence at SEQ ID NO 522
gttgtaggacgaaacgagttctttgtcctgggcctttgtcactcttctctgtgtaacgacttcctccctttcctgccgcaccacgcaatcaccggggcggaggcggctgccggcgagcacttgggcgtctccggccaccgcctgcctcgttgtggctccccgttgactcccgcgatttgttacccgctggcgctgccgcacacagctcaaaaggagtagcagcgcccctggttgccggttggagcgtcaaggatgagcgggaggaagaatgcgggcaaggtttccccctggttgctcgtcctcatctgtttagggtgcttctttgtgacctacaacctcctgacgatgcccagccggggacgggatgggccgcgcaagttcctcggcggcggcggggatcgccactcaactgcctcgttggggtcaggctctgattcggaccccgcgaagcggttccacgtcgcgcttacggcgacggacgcactgtacagtcagtggcagtcgcggataatgcactactggtataaggagatgagggaccgacctggttccgacatgggtggcttcactaggatccttcactcgggcaagcctgatggattgatggatgagatacccaccatggtggttgatccccttcctgaaggcaaggatcagggatatattgtcttaaataggccttgggcttttgtccagtggatccagaaagcaaagatcgtagaagagtatatattaatggcagagccagatcatgtctttgtgaagcctttgccaaacttatctcatggtgatgagccagcggcatttccatttttctacatcaaaccgactgagaatgagaagatattgaggaagtttttcccagaagaaaaagggcctatttcaaatattgatcctattggcaactctccggttataatcaagaaggctcagcttgagaagattgctccaacctggatgaatgtttcattaaaaatgaaagaggatcaggagacagacaaagcattcggatgggtcttggaaatgtacgcatacgctgttgctagtgcactgcacggtgtgcaccatagtctccataaagattttatgattcagcctccttgggacctgaaaacggacaacacattcatcatccattatacgtatggatgcgattattcaatgaagggtcagcttacttatgggaaaatcggtgaatggcgttttgacaaaagatcttaccttcaatctcstccaccaagaartctttcactgccccctccaggagttcctgaaagtgtggtcacccttgtgaagatggtcaatgaggccaccgcaaacattccsgsgtgggaggacsatagatgattgatggtctggctgagttgtagtttattccagcacccagctggtatggcttttgttcaaaaacatggaagaatatcattggtcaataaaagaaaagcattgatt

SEQ ID NO: 522 - protein, 364 aa, Zea mays
  misc_feature: Ceres CLONE ID no.221188
  misc_feature: Bit score of 866.5 for HMM based on sequences of FIGURE 2.
  misc_feature: Functional Homolog Of Ceres SEEDLINE ID no. ME00045 at SEQ ID NO. 489
  misc_feature (327)..(327): Xaa is any aa, unknown, or other
  misc_feature (331)..(331): Xaa is any aa, unknown, or other
  misc_feature (358)..(358): Xaa is any aa, unknown, or other
  misc_feature (359)..(359): Xaa is any aa, unknown, or other
  misc_feature (363)..(363): Xaa is any aa, unknown, or other
MSGRKNAGKVSPWLLVLICLGCFFVTYNLLTMPSRGRDGPRKFLGGGGDRHSTASLGSGSDSDPAKRFHVALTATDALYSQWQSRIMHYWYKEMRDRPGSDMGGFTRILHSGKPDGLMDEIPTMVVDPLPEGKDQGYIVLNRPWAFVQWIQKAKIVEEYILMAEPDHVFVKPLPNLSHGDEPAAFPFFYIKPTENEKILRKFFPEEKGPISNIDPIGNSPVIIKKAQLEKIAPTWMNVSLKMKEDQETDKAFGWVLEMYAYAVASALHGVHHSLHKDFMIQPPWDLKTDNTFIIHYTYGCDYSMKGQLTYGKIGEWRFDKRSYLQSXPPRXLSLPPPGVPESVVTLVKMVNEATANIXXWEDXR

SEQ ID NO: 523 - DNA, 1089 bp, Populus balsamifera subsp. trichocarpa
  misc_feature: Ceres ANNOT ID no.1477714
  misc_feature: Encodes the peptide sequence at SEQ ID NO 524
atgggttgtgggaatttcttctttacagtactaataaccttgtcagtagcccttataacatacaacatccttatatcagcaaacgcaccacttaaacaagacttaccaggtccatcatcaagatcaacacttttggttgacccagtaatcaagatgccattagaaagatcaagaagatcaagttttggtaaaaagagactgtttcatacagctgtgacagcttctgattctgtgtataatacttggcagtgtagggtaatgtattattggtacaagaagcataaagatggacccaatagtgagatgggagggttcactaggatcttgcattctggaaagcctgataagtttatggaggaaatcccaacttttatagcacagcccttgcctgctgggatggatcagggctatatagttctcaacagaccttgggcatttgtgcaatggcttcaaaaaacagacataaaagaagattacatattgatggcagagccagatcatattattgttaagcccatcccgaacctatctaaagatggccttggagctgcgtttcctttcttttacattgaaccaaaaaagtatgagtctgtcctccgaaagtacttccctgaggataagggaccaataacaaacatcgaccccataggaaattctcctgtcattgttgggaaggaatctcttaagaagattgctcccacttggatgaatgtctccttggcaatgaaaaaggatcccgagacagataaagcttttggctgggtgcttgaaatgtatggttatgctgtttcatctgctctacatggcgttggcaacatcctgtacaaggacttcatgattcagcctccttgggatacagaagttggcaagaagttcataattcattacacttacggatgtgactatgatatgaagggtaaattaacctacggaaagattggagaatggaggtttgacaagagatcttatgataccgttatacccccaagaaaccttcccttgcctccaccgggtgttccagagagtgtggttactctggtgaaaatggtgaatgaagctactgcaaacattccaaattggggatcctaa

SEQ ID NO: 524 - protein, 362 aa, Populus balsamifera subsp. trichocarpa
  misc_feature: Ceres ANNOT ID no.1477714
  misc_feature: Bit score of 750.7 for HMM based on sequences of FIGURE 2.
  misc_feature: Functional Homolog Of Ceres SEEDLINE ID no. ME00045 at SEQ ID NO. 489
MGCGNFFFTVLITLSVALITYNILISANAPLKQDLPGPSSRSTLLVDPVIKMPLERSRRSSFGKKRLFHTAVTASDSVYNTWQCRVMYYWYKKHKDGPNSEMGGFTRILHSGKPDKFMEEIPTFIAQPLPAGMDQGYIVLNRPWAFVQWLQKTDIKEDYILMAEPDHIIVKPIPNLSKDGLGAAFPFFYIEPKKYESVLRKYFPEDKGPITNIDPIGNSPVIVGKESLKKIAPTWMNVSLAMKKDPETDKAFGWVLEMYGYAVSSALHGVGNILYKDFMIQPPWDTEVGKKFIIHYTYGCDYDMKGKLTYGKIGEWRFDKRSYDTVIPPRNLPLPPPGVPESVVTLVKMVNEATANIPNWGS

SEQ ID NO: 525 - DNA, 1816 bp, Panicum virgatum
  misc_feature: Ceres CLONE ID no.1787953
  misc_feature: Encodes the peptide sequence at SEQ ID NO 526
agcgattgccgcccacccacccacgcagtgccgaccttcttgttgcccccgccggggtccagcccgctggccggcggcgctcccgcgccgccttgccttcgctgtcggccgaaccgccaaaaccaccagatcctctgcaacgagttcctctccttcccacgccgtcaccgcggcggaggcgacagccgctgaccgctcagccctctccggccggccaccgcctgcctcgtcgtggcttcgaagtgactccggcgatcggtccctcgctggcgctgccgcgcacggctcgacaagagtaggcggcgccccctggttgcgggttggggcgtgaaggatgagcgggaggaagaatgccggaagcacctccccctggatgctcatcctcatctccctagtatgcttcttcgcgacctacaacttcctgacgatgcccagccggggttgggacgggccgcgcaagttcctcggcgggggcggcggggatcgggactcggctgtctcgtacaggtcgggctctggttcggaccccaataagcggttccacgtcgcgctgacggcgacggatgcgctttacagccagtggcagtcccggataatgcactattggtacaaggagatgagggaccggcctgggtccgatatgggcggcttcacaaggatccttcactcggggaagcctgatggattgatggatgagatacccaccatggtggttgacccgcttcctgaaggcaaggataagggatacattgtcttaaataggccttgggcgtttgtccagtggctgcagaaagcaaagatcgacgaagactatatactaatagcggagccagatcatatctttgtgaagcctttgccaaacttagcccatggtgatgaaccagcggcttttccatttttctacatcaaaccaaccgagaacgagaagatattgaggaagttctttccagaagaaaaaggacctgtctcaaaaatcgatcccattggcaactctccggttataatcaagaaggctcaacttgagaagattgcaacaacctggatgaatgtttcactacaaatgaaagaggatcaggagacagacaaagcatttggatgggtcttggaaatgtatgcatatgctgttgctagtgcactgcacggtgtgcaccatagtctccgtaaagattttatgattcagcctccttgggacctgaaatcagacaacacattcatcatccattacacatatggatgcgattattcgatgaagggtgagctaacttatgggaaaattggtgagtggcgttttgacaaaagatcttaccttcaatcaccaccaccaagaaatctttcactaccccctccaggagttcctgaaagtgtggtcacccttgtgaagatggtcaacgaggccacggcaaacattccagggtgggaggacgaaagataactgatggtattgctgagtcgtagcttgtttcagcttccagctagtatggtctttgttggaaaacatggaagagtaccactggccaattaaagaagagtattcaatctcatagtgtagggctggccaattttctacggtttaacataggttagtgtttgggaaggaaaagttatattcactttgatctagcgagtcacatcatttttgtattgtaaatcagaaatataggcttttggttactcttggttcattttgccacgttataaagcggagatgtagtttagaatcctccaatgcataccatgagaggtctgtaaaaactaaaaagtcatcttgggaaaaaatctgctggagtgctgacaacaaaaaaaaaaaaaaaaaaaa

SEQ ID NO: 526 - protein, 365 aa, Panicum virgatum
  misc_feature: Ceres CLONE ID no.1787953
  misc_feature: Bit score of 881.3 for HMM based on sequences of FIGURE 2.
  misc_feature: Functional Homolog Of Ceres SEEDLINE ID no. ME00045 at SEQ ID NO. 489
MSGRKNAGSTSPWMLILISLVCFFATYNFLTMPSRGWDGPRKFLGGGGGDRDSAVSYRSGSGSDPNKRFHVALTATDALYSQWQSRIMHYWYKEMRDRPGSDMGGFTRILHSGKPDGLMDEIPTMVVDPLPEGKDKGYIVLNRPWAFVQWLQKAKIDEDYILIAEPDHIFVKPLPNLAHGDEPAAFPFFYIKPTENEKILRKFFPEEKGPVSKIDPIGNSPVIIKKAQLEKIATTWMNVSLQMKEDQETDKAFGWVLEMYAYAVASALHGVHHSLRKDFMIQPPWDLKSDNTFIIHYTYGCDYSMKGELTYGKIGEWRFDKRSYLQSPPPRNLSLPPPGVPESVVTLVKMVNEATANIPGWEDER

SEQ ID NO: 527 - DNA, 1080 bp, Populus balsamifera subsp. trichocarpa
  misc_feature: Ceres ANNOT ID no.1531210
  misc_feature: Encodes the peptide sequence at SEQ ID NO 528
atgggttgtgggaatttcttctttacagtactaataaccttgtcagtagcccttataacatacaacatccttatatcagcaaacgcaccacttaaacaagacttaccaggtccatcatcaagatcaacacttttggttgacccagtaatcaagatgccattagaaagatcaagaagatcaagttttggtaaaaagagactgtttcatacagctgtgacagcttctgattctgtgtataatacttggcagtgtagggtaatgtattattggtacaagaagcataaagatggacccaatagtgagatgggagggttcactaggatcttgcattctggaaagcctgataagtttatggaggaaatcccaacttttatagcacagcccttgcctgctgggatggatcagggctatatagttctcaacagaccttgggcatttgtgcaatggcttcaaaaaacagacataaaagaagattacatattgatggcagagccagatcatattattgttaagcccatcccgaacctatctaaagatggccttggagctgcgtttcctttcttttacattgaaccaaaaaagtatgagtctgtcctccgaaagtacttccctgaggataagggaccaataacaaacatcgaccccataggaaattctcctgtcattgttgggaaggaatctcttaagaagattgctcccacttggatgaatgtctccttggcaatgaaaaaggatcccgagacagataaagcttttggctgggtgtatggttatgctgtttcatctgctctacatggcgttggcaacatcctgtacaaggacttcatgattcagcctccttgggatacagaagttggcaagaagttcataattcattacacttacggatgtgactatgatatgaagggtaaattaacctacggaaagattggagaatggaggtttgacaagagatcttatgataccgttatacccccaagaaaccttcccttgcctccaccgggtgttccagagagtgtggttactctggtgaaaatggtgaatgaagctactgcaaacattccaaattggggatcctaa

SEQ ID NO: 528 - protein, 359 aa, Populus balsamifera subsp. trichocarpa
  misc_feature: Ceres ANNOT ID no.1531210
  misc_feature: Bit score of 730.2 for HMM based on sequences of FIGURE 2.
  misc_feature: Functional Homolog Of Ceres SEEDLINE ID no. ME00045 at SEQ ID NO. 489
MGCGNFFFTVLITLSVALITYNILISANAPLKQDLPGPSSRSTLLVDPVIKMPLERSRRSSFGKKRLFHTAVTASDSVYNTWQCRVMYYWYKKHKDGPNSEMGGFTRILHSGKPDKFMEEIPTFIAQPLPAGMDQGYIVLNRPWAFVQWLQKTDIKEDYILMAEPDHIIVKPIPNLSKDGLGAAFPFFYIEPKKYESVLRKYFPEDKGPITNIDPIGNSPVIVGKESLKKIAPTWMNVSLAMKKDPETDKAFGWVYGYAVSSALHGVGNILYKDFMIQPPWDTEVGKKFIIHYTYGCDYDMKGKLTYGKIGEWRFDKRSYDTVIPPRNLPLPPPGVPESVVTLVKMVNEATANIPNWGS

SEQ ID NO: 529 - DNA, 1348 bp, Glycine max
  misc_feature: Ceres CLONE ID no.521176
  misc_feature: Encodes the peptide sequence at SEQ ID NO 530
gctctttcatcataaacaaagattcttctctattctccaactcttttgcttcttctttcaaagtggcatcaaaaactagaagaaaatggggtgtggcaatttgttcttcacagtcctcataaccttctcagtggcactcataacatacaacatcataatctctgccaatgcccctctcaagcaggacttcccaggcccctcacgcccctccatcaaggtggatcccctcatcaagatgccactccacagatcatcatcctcggagaaatcaaaaaagaggttgtttcacactgctgtcactgcctctgattctgtgtacaacacgtggcagtgcagagtgatgtactattggttcaagaagttcagggatggaggaggagacgaatccgggatggggggtttcacccggatcctgcactcggggaagcctgaccagttcatggatgagatccccacctttgttgctcagcctctgcctgctgggatggatcagggttacatagtccttaatagaccatgggcatttgtgcagtggcttcaacaagcagatattaaagaagattacatattgatgtcagagccagatcatataattgtcaaacctatacccaacttagccagagatgggctaggagctgcatttcctttcttttatattgagcctaagaagtatgaaactgtgctaaggaagtacttccctgacgagaagggaccaataaccaatattgatccaattgggaattcacctgttattgttggaaaggaattcctcaagaagattgctcccacatggatgaatgtttccctggcaatgaagaaggatcctgaaactgataaagcttttggatgggtgcttgaaatgtatgcttacgctgttgcatctgctcttcatggtgttcgtaacatattatacaaggacttcatgattcagcctccatgggatcaagaaattggcaagacatacataattcactacacttatggctgtgactatacaatgaagggtgagctaacctatggaaagattggagaatggagatttgataaaagatcttatgataaagttgctcccccaaagaatctgacattgccaccacccggtgttccagaaagtgtagtgactctcgtaaaaatggtgaatgaagctactgcaaatattccaaattggtggtcatagggaaggttaaaggtgttgcaaattacgatagttggagaatgcgttggacctatggccattttaaatggaagggcattgtacacgtcattgcttatgtatttatgcattcttcgaatatagtttgaccagtgagtgagacaaacctgtggaattgatatcactggtgcttct

SEQ ID NO: 530 - protein, 363 aa, Glycine max
  misc_feature: Ceres CLONE ID no.521176
  misc_feature: Bit score of 745.5 for HMM based on sequences of FIGURE 2.
  misc_feature: Functional Homolog Of Ceres SEEDLINE ID no. ME00045 at SEQ ID NO. 489
MGCGNLFFTVLITFSVALITYNIIISANAPLKQDFPGPSRPSIKVDPLIKMPLHRSSSSEKSKKRLFHTAVTASDSVYNTWQCRVMYYWFKKFRDGGGDESGMGGFTRILHSGKPDQFMDEIPTFVAQPLPAGMDQGYIVLNRPWAFVQWLQQADIKEDYILMSEPDHIIVKPIPNLARDGLGAAFPFFYIEPKKYETVLRKYFPDEKGPITNIDPIGNSPVIVGKEFLKKIAPTWMNVSLAMKKDPETDKAFGWVLEMYAYAVASALHGVRNILYKDFMIQPPWDQEIGKTYIIHYTYGCDYTMKGELTYGKIGEWRFDKRSYDKVAPPKNLTLPPPGVPESVVTLVKMVNEATANIPNWWS

SEQ ID NO: 531 - protein, 366 aa, Arabidopsis thaliana
  misc_feature: Public GI ID no.22327055
  misc_feature: Bit score of 727.9 for HMM based on sequences of FIGURE 2.
  misc_feature: Functional Homolog Of Ceres SEEDLINE ID no. ME00045 at SEQ ID NO. 489
MGCGGTLFYPLLITLSVALITYNIIISANAPLKQGFPGRSSSSDISIDPVIELPRGGGSRNNDGKRIRLFHTAVTASDSVYNTWQCRVMYYWFKKIQASAGPGSEMGGFTRILHSGKPDQYMDEIPTFVAQPLPSGMDQGYVVLNRPWAFVQWLQQTDIKEDYILMSEPDHIIVKPIPNLAKDGLGAAFPFFYIEPKKYEKVLRKYYPEVRGPVTNIDPIGNSPVIVGKDALKKIAPTWMNVSLAMKKDPEADKAFGWVLEMYAYAVSSALHGVSNILHKDFMIQPPWDIEVGDKYIIHYTYGCDYDMKGKLTYGKIGEWRFDKRSYDSKPPPRNLTMPPPGVSQSVVTLVKMINEATANIPNWGS

SEQ ID NO: 532 - DNA, 1071 bp, Populus balsamifera subsp. trichocarpa
  misc_feature: Ceres ANNOT ID no.1508824
  misc_feature: Encodes the peptide sequence at SEQ ID NO 533
atgggttgtggggatctcttcttttcactgcttataaccttctcagcagcccttataacatacaatatccttatatcagcaaatgcaccacttaagcaagaactaccgggtccatcatcaagatcatcacttttagttgacccaattatcaagatgccattcggaagatcaagttttggtaaaaagagactgtttcatacagctgtgacagcttctgattctgtgtataatacttggcagtgtagggtgatgtattattggtacaagaagcataaagatggacccaatagtgaaatgggtgggtttactaggatcttgcattctggaaagcctgacaagtttatggaggaaatcccgacttttatagcacagcctttgccttctgggatggatcagggctatatagttctcaacagaccttgggcatttgtgcaatggcttcaaaaagcagacataaaagaagattacatactgatggcagagccagatcatattattgttaagcccatcccaaacctatctaaagatggccttggagctgcatttcctttcttttacattgaacctaaaaagtatgaatctgtcctccgaaagtacttccctgaggataagggaccgataacaaccatcgaccccataggaaattctcctgtcattgttggaaaggaatctcttaagaagattgctcccacttggatgaatatctccttagcaatgaaaaaggatcctgaaacagataaagcttttggatgggtgtatgcttatgctgtttcatctgctctacatggtgttggtaacatcctgtacaaggacttcatgattcagcctccgtgggatacagaaattggcaagaagttcatcattcattacacttatggatgtgactatgatatgaagggtaaattaacctatggaaagattggagaatggaggtttgacaaaaggtcatatgataatgttgcacccccaagaaaccttcccttgcctccaccgggtgttccagatagtgtggttactctggtgaaaatggtgaatgaagctacttcaaacattccaaattggggatcctaa

SEQ ID NO: 533 - protein, 356 aa, Populus balsamifera subsp. trichocarpa
  misc_feature: Ceres ANNOT ID no.1508824
  misc_feature: Bit score of 724.2 for HMM based on sequences of FIGURE 2.
  misc_feature: Functional Homolog Of Ceres SEEDLINE ID no. ME00045 at SEQ ID NO. 489
MGCGDLFFSLLITFSAALITYNILISANAPLKQELPGPSSRSSLLVDPIIKMPFGRSSFGKKRLFHTAVTASDSVYNTWQCRVMYYWYKKHKDGPNSEMGGFTRILHSGKPDKFMEEIPTFIAQPLPSGMDQGYIVLNRPWAFVQWLQKADIKEDYILMAEPDHIIVKPIPNLSKDGLGAAFPFFYIEPKKYESVLRKYFPEDKGPITTIDPIGNSPVIVGKESLKKIAPTWMNISLAMKKDPETDKAFGWVYAYAVSSALHGVGNILYKDFMIQPPWDTEIGKKFIIHYTYGCDYDMKGKLTYGKIGEWRFDKRSYDNVAPPRNLPLPPPGVPDSVVTLVKMVNEATSNIPNWGS

SEQ ID NO: 534 - DNA, 1472 bp, Arabidopsis thaliana
  misc_feature: Ceres CLONE ID no.38879
  misc_feature: Encodes the peptide sequence at SEQ ID NO 535
aaaagcaatttagaacttataaaaaggaaagccatttcttcggcatcctcttcaccaactggcataagcagaagaagaagaagacaacgacgacgactttgaagaagaacaaactcttccttcaatctcaatctctcaatctctctctcagatgggttgtggtggaactttgttctacccacttctcataactctctccgttgctctaatcacttacaacatcatcatctccgctaatgctcctctcaaacaaggcttcccaggccgatcttcttcctccgatatctccattgacccagtcatcgaattgccacgtggcggcggatccagaaacaacgatggtaaaaggataagacttttccacacgtcggtgacggcgtctgattccgtctacaacacttggcaatgtagagttatgtactattggttcaaaaagattcaagcttctgctggacccggttctgaaatgggtgggtttactcggatcttacattccggtaaaccggatcagtatatggatgagattcctacttttgttgctcagcctttaccttctgggatggatcagggttatgttgtgttgaataggccatgggcatttgtacaatggcttcaacaaacagatattaaagaagattatattttgatgtctgagcctgatcatatcattgttaaacctataccaaatttggctaaagatgggcttggagctgcatttcctttcttttacattgaaccgaaaaagtatgagaaggtgttgaggaagtattatcctgaagtgagaggaccggttactaatatcgatccgataggaaactctcctgtcattgttggaaaggatgctttgaagaagattgctccaacttggatgaatgtttctttggctatgaagaaggatcctgaagcagacaaggcttttggatgggttcttgaaatgtatgcttatgctgtctcatctgcattgcatggtgttagcaatattctacacaaagacttcatgattcagcctccatgggatatagaggttggtgacaagtacatcatacactacacttatggatgtgattatgatatgaagggtaaattaacttatgggaaaatcggggaatggagatttgacaaaagatcgtatgatagcaaaccaccaccaaggaaccttacaatgcctccacctggtgtttcacaaagtgtggtaacactagtgaagatgataaatgaagccacggccaacataccaaactggggatcataaagagacagagagagagaaaccgtaatctatatgtacctgtgagttgctcctttcttttcaaaataccttgtcctgctctttagtttctcctttggttgtggctaggtttgtaacatatatagtgattcaaacaaagcctttctttggcatcttacttctctaattcggtctagtctccactagactctgatgtcctctagcatctcaaaggataaattac

SEQ ID NO: 535 - protein, 366 aa, Arabidopsis thaliana
  misc_feature: Ceres CLONE ID no.38879
  misc_feature: Bit score of 725.3 for HMM based on sequences of FIGURE 2.
  misc_feature: Functional Homolog Of Ceres SEEDLINE ID no. ME00045 at SEQ ID NO. 489
MGCGGTLFYPLLITLSVALITYNIIISANAPLKQGFPGRSSSSDISIDPVIELPRGGGSRNNDGKRIRLFHTSVTASDSVYNTWQCRVMYYWFKKIQASAGPGSEMGGFTRILHSGKPDQYMDEIPTFVAQPLPSGMDQGYVVLNRPWAFVQWLQQTDIKEDYILMSEPDHIIVKPIPNLAKDGLGAAFPFFYIEPKKYEKVLRKYYPEVRGPVTNIDPIGNSPVIVGKDALKKIAPTWMNVSLAMKKDPEADKAFGWVLEMYAYAVSSALHGVSNILHKDFMIQPPWDIEVGDKYIIHYTYGCDYDMKGKLTYGKIGEWRFDKRSYDSKPPPRNLTMPPPGVSQSVVTLVKMINEATANIPNWGS

SEQ ID NO: 536 - protein, 358 aa, Arabidopsis thaliana
  misc_feature: Public GI ID no.42569309
  misc_feature: Bit score of 715.1 for HMM based on sequences of FIGURE 2.
  misc_feature: Functional Homolog Of Ceres SEEDLINE ID no. ME00045 at SEQ ID NO. 489
MGFRGKYFFPILMTLSLFLIIRYNYIVSDDPPLRQELPGRRSASSGDDITYTVKTPSKKTKRLFHTAVTATDSVYSTWQCRVMYYWYNRFRDEPGSDMGGYTRILHSGRPDGLMDEIPTFVADPLPSGVDKGYVVLNRPWAFVQWLQQAHIEEDYILMAEPDHIIVKPIPNLARGNLAAAFPFFYIEPKKYESVLRKFFPKENGPISRIDPIGNSPVIVTKNALMKIAPTWMNVSLAMKNDPQTDKAFGWVLEMYAYAVSSALHGVSNILHKDFMIQPPWDTETKKTFIIHYTYGCDFDMKGKMMVGKIGEWRFDKRSYGDKPPPRNLTLPPRGVPESVVTLVTMINEATANIPNWES

SEQ ID NO: 537 - DNA, 1755 bp, Panicum virgatum
  misc_feature: Ceres CLONE ID no.1817784
  misc_feature: Encodes the peptide sequence at SEQ ID NO 538
cctgctgctggcctgctggccatctgatgatggagtggtgggtccgagcctacttgtaaaaaaggaagaaattcagcccttctcagttctctcgctcttcctctgcgacgagttctcctcgccttcccacgccatcaccgcggcggaggcgacagccgctgaccgctccgccctctccggccggccaccgcctgcctcgtcgtggcttcgcagtgactcccagattgcgggttggggcgtgaaggatgagcgggaggaagaatgccggaaggacctctccctggatgctcctcctcatctccctagtatgcttcttcgcgacctacaacttcctgacgatgcccagccggggttgggacgtgccgcacaagttcctcggcggcggcggggatcggggctcggccgtctcgtacaggtcgggctctggttcggcggcggaccccacgaagcggttccacgtcgcgctgacggcgacggacgcgctttacagccagtggcagtcccgtataatgcactattggtacaaggagatgaggggccggcctgggtccgacatgggcggcttcacaaggatccttcactcggggaagcctgatggattgatggatgagatacccaccatggtggttgacccgcttcctgaaggcaaggataagggatacattgtcttaaataggccttgggcgtttgtccagtggctgcagaaggcaaagatcgacgaagactatatactaatggcggagccagatcatgtctttgtgaagcctttgccaaacttagcccatggtgatgaaccagcggcttttccatttttctacatcaaaccaactgagaacgagaagatattgaggaagttctttccagaagaaaaaggacctgtctcaaaaatcgatcctattggcaactctccagttataatcaagaaggctcaactcgagaagattgcaacaacctggatgaatgtttcactaaaaatgaaagaggaccaggagacagacaaagcattcggatgggtcttggaaatgtatgcatacgctgttgctagtgcactgcacggtgtgcaccatagtctccgtaaagattttatgattcagcctccttgggacctgaaatcagacaacacattcatcatccattacacgtatggatgcgattattcgatgaagggtgagctaacttatgggaaaattggtgagtggcgttttgacaaaagatcttaccttcaatcaccaccaccaagaaatctttcactaccccctccaggagttcctgaaagtgtgagcacgatatcctctcttgtcagtcttgattactcgttcgtagcagttgatatgtgtgctgtgaattgaaattgacggcatggccggcacgagaaacagacgaggaggtgatggatcctgatttgaagttgaaacctgccgcttgtgctctgaagcgtgctcttctagtggcactgcgatgcgatgtgtcgacccagatgctgaggaaaaaaaatctattatgggtcaagttggcgggatgcttgaagccgaatatgtcgtcatgagaataaaaaaaatatcatcatgggagctttgtacaggatcctcggtttgcatttctggagggcattgcattttgtactgtacaatatgaattatccttccctagtttcctttgtggtagccagcttagagagcagaatcggatcgattccctgaccctgagggctgaaagattgaaactactgtgaatcctattcctattctgtctgtc

SEQ ID NO: 538 - protein, 367 aa, Panicum virgatum
  misc_feature: Ceres CLONE ID no.1817784
  misc_feature: Bit score of 817.8 for HMM based on sequences of FIGURE 2.
  misc_feature: Functional Homolog Of Ceres SEEDLINE ID no. ME00045 at SEQ ID NO. 489
MSGRKNAGRTSPWMLLLISLVCFFATYNFLTMPSRGWDVPHKFLGGGGDRGSAVSYRSGSGSAADPTKRFHVALTATDALYSQWQSRIMHYWYKEMRGRPGSDMGGFTRILHSGKPDGLMDEIPTMVVDPLPEGKDKGYIVLNRPWAFVQWLQKAKIDEDYILMAEPDHVFVKPLPNLAHGDEPAAFPFFYIKPTENEKILRKFFPEEKGPVSKIDPIGNSPVIIKKAQLEKIATTWMNVSLKMKEDQETDKAFGWVLEMYAYAVASALHGVHHSLRKDFMIQPPWDLKSDNTFIIHYTYGCDYSMKGELTYGKIGEWRFDKRSYLQSPPPRNLSLPPPGVPESVSTISSLVSLDYSFVAVDMCAVN

SEQ ID NO: 539 - DNA, 1573 bp, Zea mays
  misc_feature: Ceres CLONE ID no.284637
  misc_feature: Encodes the peptide sequence at SEQ ID NO 540
aaaaactgccaaacactgcacactcgggagtcaggactgggccgtttcagtgtcacttccgccgccttctccctcaatcaagagcgcccgtcccttcgcccgcgcgccccgccatggccgcgccgtgcggccgcggcggcggcacgctgacgctggtcctcgtggctctctccgcggcgttcctcacctacaacgtgctcatctccttccactcctccctccagcccctcccttcctccttccccaccgccaccgcctcccgccgcttcggcgccgcggggtctgccaggcggagggcgttccacaccgcggtgaccgcgtcagggtccgcgtacaacacgtggcagtgccgcgtcatgtaccactggttcaaggaggcgcgccgggcgccgggcggcgacgagatgggcgggttcaccaggatcctgcactccgggaaacccgacgagttcgtcgatgagatccccacattcgtcgccgacccactccccgatggggatcagggatacatcgttctcaataggccatgggcatttgttcagtggctccagaaagcagacataaaggaagactatattttgatggcagagccagatcacataattgtcaagcctatcccaaacttgtcgagagatggtcaggcagcagcttttcctttcttttacattgagcctaaaaaatatgagaatgtgttgcgtaagttcttccctgaagacaaggggtcaatcactaagatcgatcctataggaaactctcctgtcattattgagaaggagtctcttggaaggattgcaccgacttggatgaatgtttcattagcaatgaaaaaagatcctgacgcagataaatcttttggctgggttcttgaaatgtatgcctatgccgtggcatctgctctccatggagtgggcaacatcttacgcaaggactttatgattcagccaccttgggacttggaagttggtgattcttttattattcattatacttatgggtgtgattatgacatgacgggtaagctgacttatggcaaaattggtgaatggagatttgacaagagatcatacacggacaaacctccacctagaaatttgccgttaccaccacatggtgtagctcaaagtgtggtgacacttgtgaaaatggtcaatgaagcaacagccaacataccaaactgggactcctatgccgctgctttttaacctgttataaatttggctcacaattttgtttgccagatatttccattccagctgactttgatacatgataattgcctaacatggaagatgagtggatgatacagtggaatgcataccaggttttacacaaggctgccggttccttacctttctgattgaatcctgataatatatggtgcaatgccatccctttccccccctaattttgttaaacacatgcacatcagcacatggcacaatatgtcaaaacacactcacctttggtgaaagctgcaatgtagatgactgagagatgtgatgttcttatctggatctgaatgtgcttattagaagaagaaaaaaaagagtcaggcgctgctctgacaaacgct

SEQ ID NO: 540 - protein, 362 aa, Zea mays
  misc_feature: Ceres CLONE ID no.284637
  misc_feature: Bit score of 708.9 for HMM based on sequences of FIGURE 2.
  misc_feature: Functional Homolog Of Ceres SEEDLINE ID no. ME00045 at SEQ ID NO. 489
MAAPCGRGGGTLTLVLVALSAAFLTYNVLISFHSSLQPLPSSFPTATASRRFGAAGSARRRAFHTAVTASGSAYNTWQCRVMYHWFKEARRAPGGDEMGGFTRILHSGKPDEFVDEIPTFVADPLPDGDQGYIVLNRPWAFVQWLQKADIKEDYILMAEPDHIIVKPIPNLSRDGQAAAFPFFYIEPKKYENVLRKFFPEDKGSITKIDPIGNSPVIIEKESLGRIAPTWMNVSLAMKKDPDADKSFGWVLEMYAYAVASALHGVGNILRKDFMIQPPWDLEVGDSFIIHYTYGCDYDMTGKLTYGKIGEWRFDKRSYTDKPPPRNLPLPPHGVAQSVVTLVKMVNEATANIPNWDSYAAAF

SEQ ID NO: 541 - protein, 364 aa, Oryza sativa subsp. japonica
  misc_feature: Public GI ID no.125596251
  misc_feature: Bit score of 708.7 for HMM based on sequences of FIGURE 2.
  misc_feature: Functional Homolog Of Ceres SEEDLINE ID no. ME00045 at SEQ ID NO. 489
MAAPCRGSRGALPLLLISLSAAYLTYTALLSSRSLLPLPTASFPGATASRRLASGRPTAAAAFHTAVTASGSLYNTWQCRVMYYWFKRAREAGGGGGAEMGGFTRILHSGKPDAFVDEIPTFVADPLPAGTDQGYVVLNRPWAFVQWLQKADIQEEYILMAEPDHLIVKPIPNLSRDGRSAAFPFFYIEPKKYENVLRKFFPEHEGPITKIDPIGNSPVIARKESLARIAPTWMNISIAMKKDPETDKAFGWVLEMYAYAVASALHGVGNILHKEFMIQPPWDLEIGDAFIIHYTYGCDYDMKGKLTYGKIGEWRFDKRSYDSKPPPRNLPLPPNGVPQSVVTLVKMVNEATANIPNWDSYAAA

SEQ ID NO: 542 - DNA, 1233 bp, Populus balsamifera subsp. trichocarpa
  misc_feature: Ceres ANNOT ID no.1509601
  misc_feature: Encodes the peptide sequence at SEQ ID NO 648
atgacaaaccaaaatgtggtagtggctgatacaaactctggactcaacttggcaatcacagtgcatgtaacaaactcctctatcttcacaacggcggcccagaaacctccagcggcaccaggtggttacatatccatttctagaaagaaactcttaaagaatctggaaatcaatggaggagcaagaattaatgcttgggttgattccatgagagcctcatctcctactcatatcaagtccacgccttctgttaatgaagaccaaagctcatggattcttcaccacccatcagcactggagatgtttgagcagataattgatgcctctaaaggaaagcaaattgttatgttcttggactatgatggcacactttctcctattgttgatgacccagataaagctttcatgtccaagcaggtgatgagagcaacagtgagaaagcttgcaagatttttccctactgcaatagtgagtgggaggtgcagagacaaggtgtataactttgtacggttagcagaactgtactatgctggaagccatggcatggacattaaaggaccagcaaaaggctccaaatacaagaaagctgccagtgaatttcttcccatgatagatgaggtttacgaagaattggtagagaaaactaaaacaactccaggggccaaggtggagaacaacaaattctgcctctctgtgcactatcgctgcgttgatgagaaaaaatggagtggactggcacaagtagttaagtcagtgttgaaggagtacccaaagcttcgacttactcaaggaagaaaggttttagaaatccgccctaccattaaatgggacaaaggaaaggctcttgaatttttgttagagtcacttggattcgccaattgcactgatgtttttcctgtttacattggagatgatagaacagacgaagatgcatttaaggtactaagagagagaggacaaggttttggtatcttggtctctaaaatcccaaaggacactagtgcatcttattccctacaggaacccacccaggcaacttggcatgctttagctcaaacacacttgcatgtgcttgggacctcaaatcgcaaacaaagccccaaatttttcacaaacgatgcttgtaagagaaaggtccttgagcccacggttgccagctttgtgaatattcctttgctaataatttcgaaggctacccccgctagaaggttgaggaagggaggtatcgtgtga

SEQ ID NO: 543 - protein, 364 aa, Oryza sativa subsp. indica
  misc_feature: Public GI ID no.125554300
  misc_feature: Bit score of 707.3 for HMM based on sequences of FIGURE 2.
  misc_feature: Functional Homolog Of Ceres SEEDLINE ID no. ME00045 at SEQ ID NO. 489
MAAPCRGSRGALPLLLISLSAAYLTYTGLLSSRSLLPLPTASFPGATASRRLASGRPTAAAAFHTAVTASGSLYNTWQCRVMYYWFKRAREAGGGGGAEMGGFTRILHSGKPDAFVDEIPTFVADPLPAGTDQGYVVLNRPWAFVQWLQKADIQEEYILMAEPDHLIVKPIPNLSRDGRSAAFPFFYIEPKKYENVLRKFFPEHEGPITKIDPIGNSPVIARKESLARIAPTWMNISIAMKKDPETDKAFGWVLEMYAYAVASALHGVGNILHKEFMIQPPWDLEIGDAFIIHYTYGCDYDMKGKLTYGKIGEWRFDKRSYDSKPPPRNLPLPPNGVPQSVVTLVKMVNEATANIPNWDSYAAA

SEQ ID NO: 544 - DNA, 1124 bp, Gossypium hirsutum
  misc_feature: Ceres CLONE ID no.1935437
  misc_feature: Encodes the peptide sequence at SEQ ID NO 545
aagacttccgcgttttccaccattgccgttgaatagaagaaactaaaccccaaatctctcccatgccttcagattctttctttggatttctgagggatttatgatcaattgtctgggatttttcagtaaaggatgttgttcgaaaagcataaattgaattaggcgttgcggctgtgagaagggctgggttttgtattgtgtagtgaaagatgaagcgcgtttcgccgctctttttggtacttttagtccttggattcttctttgcaacatataatttgttgactatgataatacactataagacatatacttcagagcaatgggatttctccaatccttttatacaaatgccttggaatttgatggaaggtgagggttctaactcaaagtaccacgttgctctcacggcaacagatgctccgtatagccaatggcagtgtcggattatgtattattggtataagaaggtaaaagagatgcctggatcagatatgggaaagttcactcgaattttgcattcagggaagcccgacaatttgatggaggagattccaacttttgtcgttgaccctcttccagagggtttagatcggggttatattgtcttaaatagaccatgggcttttgtgcaatggctggaaaaagcaatgattgacgaagaatacattctaatggccgaacctgaccatgtatttgtaaatcctttgcctaacttggctcgtggaaaacatccagcagggtttcctttcttttacattaagccatctgaccacaagcatgttattaggaagtattatcctgaggagaagggtcctgtgacgaatattgatccaattggcaattctccagtgattattaaaaagtctgtgctggagaaaattgcacctacatggatgaatatttctttgaggatgaaagatgacccagtgactgacaaggaatttggatgggtgctagaaatgtatgcgtatgctgtggcatctgcactgcatgacgtgcaccacatactttataaagacttcatgctccagccaccatgggatacggaagtagggaagaagtctataatccattatacttacggatgtgactacaatttgaagggagaaataacatatggaaag

SEQ ID NO: 545 - protein, 305 aa, Gossypium hirsutum
  misc_feature: Ceres CLONE ID no.1935437
  misc_feature: Bit score of 626.8 for HMM based on sequences of FIGURE 2.
  misc_feature: Functional Homolog Of Ceres SEEDLINE ID no. ME00045 at SEQ ID NO. 489
MKRVSPLFLVLLVLGFFFATYNLLTMIIHYKTYTSEQWDFSNPFIQMPWNLMEGEGSNSKYHVALTATDAPYSQWQCRIMYYWYKKVKEMPGSDMGKFTRILHSGKPDNLMEEIPTFVVDPLPEGLDRGYIVLNRPWAFVQWLEKAMIDEEYILMAEPDHVFVNPLPNLARGKHPAGFPFFYIKPSDHKHVIRKYYPEEKGPVTNIDPIGNSPVIIKKSVLEKIAPTWMNISLRMKDDPVTDKEFGWVLEMYAYAVASALHDVHHILYKDFMLQPPWDTEVGKKSIIHYTYGCDYNLKGEITYGK

SEQ ID NO: 546 - DNA, 1095 bp, Populus balsamifera subsp. trichocarpa
  misc_feature: Ceres ANNOT ID no.1455622
  misc_feature: Encodes the peptide sequence at SEQ ID NO 547
atgggttgtggggatctcttcttttcactgcttataaccttctcagcagcccttataacatacaatatccttatatcagcaaatgcaccacttaagcaagaactaccgggtccatcatcaagatcatcacttttagttgacccaattatcaagatgccattcggaagatcaagttttggtaaaaagagactgtttcatacagctgtgacagcttctgattctgtgtataatacttggcagtgtagggtgatgtattattggtacaagaagcataaagatggacccaatagtgaaatgggtgggtttactaggatcttgcattctggaaagcctgacaagtttatggaggaaatcccgacttttatagcacagcctttgccttctgggatggatcagtctattgatgatttgaaacccttaggtaaggttaagactgcttatgtacttgcttggttgctgaagaaacctaggcaaagaagttacatactgatggcagagccagatcatattattgttaagcccatcccaaacctatctaaagatggccttggagctgcatttcctttcttttacattgaacctaaaaagtatgaatctgtcctccgaaagtacttccctgaggataagggaccgataacaaccatcgaccccataggaaattctcctgtcattgttggaaaggaatctcttaagaagattgctcccacttggatgaatatctccttagcaatgaaaaaggatcctgaaacagataaagcttttggatgggtgcttgaaatgtatgcttatgctgtttcatctgctctacatggtgttggtaacatcctgtacaaggacttcatgattcagcctccgtgggatacagaaattggcaagaagttcatcattcattacacttatggatgtgactatgatatgaagggtaaattaacctatggaaagattggagaatggaggtttgacaaaaggtcatatgataatgttgcacccccaagaaaccttcccttgcctccaccgggtgttccagatagtgtggttactctggtgaaaatggtgaatgaagctacttcaaacattccaaattggggatcctaa

SEQ ID NO: 547 - protein, 364 aa, Populus balsamifera subsp. trichocarpa
  misc_feature: Ceres ANNOT ID no.1455622
  misc_feature: Bit score of 659.4 for HMM based on sequences of FIGURE 2.
  misc_feature: Functional Homolog Of Ceres SEEDLINE ID no. ME00045 at SEQ ID NO. 489
MGCGDLFFSLLITFSAALITYNILISANAPLKQELPGPSSRSSLLVDPIIKMPFGRSSFGKKRLFHTAVTASDSVYNTWQCRVMYYWYKKHKDGPNSEMGGFTRILHSGKPDKFMEEIPTFIAQPLPSGMDQSIDDLKPLGKVKTAYVLAWLLKKPRQRSYILMAEPDHIIVKPIPNLSKDGLGAAFPFFYIEPKKYESVLRKYFPEDKGPITTIDPIGNSPVIVGKESLKKIAPTWMNISLAMKKDPETDKAFGWVLEMYAYAVSSALHGVGNILYKDFMIQPPWDTEIGKKFIIHYTYGCDYDMKGKLTYGKIGEWRFDKRSYDNVAPPRNLPLPPPGVPDSVVTLVKMVNEATSNIPNWGS

SEQ ID NO: 548 - protein, 283 aa, Oryza sativa subsp. japonica
  misc_feature: Public GI ID no.55771354
  misc_feature: Bit score of 558.5 for HMM based on sequences of FIGURE 2.
  misc_feature: Functional Homolog Of Ceres SEEDLINE ID no. ME00045 at SEQ ID NO. 489
MYYWFKRAREAGGGGGAEMGGFTRILHSGKPDAFVDEIPTFVADPLPAGTDQGYVVLNRPWAFVQWLQKADIQEEYILMAEPDHLIVKPIPNLSRDGRSAAFPFFYIEPKKYENVLRKFFPEHEGPITKIDPIGNSPVIARKESLARIAPTWMNISIAMKKDPETDKAFGWVLEMYAYAVASALHGVGNILHKEFMIQPPWDLEIGDAFIIHYTYGCDYDMKGKLTYGKIGEWRFDKRSYDSKPPPRNLPLPPNGVPQSVVTLVKMVNEATANIPNWDSYAAA

SEQ ID NO: 549 - DNA, 915 bp, Populus balsamifera subsp. trichocarpa
  misc_feature: Ceres ANNOT ID no.1514655
  misc_feature: Encodes the peptide sequence at SEQ ID NO 550
atggggcgagcgtcgccattgctattggtgcttttggcactagggtttttctttgccacgtataacttgttgactttgataatacagtataaggattctagtacaggacttggatcagggatttctgatcctgttacagggatgccagccaattcttggaaattagggaagtcaaatttgaaattccatgttgctcttacggctactgatgctccttatagtcaatggcaatgccgggttatgtattattggtataagaaaatgaaaagcatgccaggatcagacatgggaaagttcactcgagttttgcattcggggaaaggtgatcatttgatggatgagattccaacttttattgttgatcctcttccagacggcctagatcggggatatattgtcttgaatagaccatgggcttttgtgcaatggctggaaaaggcaacaattgaggaagactacattctaatggcagagcctgaccacatattcgcaaatcctttgcctaacttggcacatggagataatccagcagggtttccatttttctatattaaaccaactgaacatgagaaaattgttagaaagttttatcctgaggagaagggtcctgtgacagatgttgatccaattggcaattcccctgtaataataaaaaagcctccatgggatttggaagttggtaagagatttatcatccactatacttatggatgcgactataatatgaagggagaattaacatatggaaagattggagaatggcggtttgacaagagatcctatctcagtggtcctccaccaaagaacctcaccctgcccccaccaggagttcctgaaagcgtggtgagacttgtaaagatggtgaatgaggctacagctaacattccaggctgggactcattgaacagtggctga

SEQ ID NO: 550 - protein, 304 aa, Populus balsamifera subsp. trichocarpa
  misc_feature: Ceres ANNOT ID no.1514655
  misc_feature: Bit score of 639.4 for HMM based on sequences of FIGURE 2.
  misc_feature: Functional Homolog Of Ceres SEEDLINE ID no. ME00045 at SEQ ID NO. 489
MGRASPLLLVLLALGFFFATYNLLTLIIQYKDSSTGLGSGISDPVTGMPANSWKLGKSNLKFHVALTATDAPYSQWQCRVMYYWYKKMKSMPGSDMGKFTRVLHSGKGDHLMDEIPTFIVDPLPDGLDRGYIVLNRPWAFVQWLEKATIEEDYILMAEPDHIFANPLPNLAHGDNPAGFPFFYIKPTEHEKIVRKFYPEEKGPVTDVDPIGNSPVIIKKPPWDLEVGKRFIIHYTYGCDYNMKGELTYGKIGEWRFDKRSYLSGPPPKNLTLPPPGVPESVVRLVKMVNEATANIPGWDSLNSG

SEQ ID NO: 551 - DNA, 966 bp, Gossypium hirsutum
  misc_feature: Ceres CLONE ID no.1848736
  misc_feature: Encodes the peptide sequence at SEQ ID NO 552
tttgactttcttgtttggttcttgattaggtctcaagatttccttgatctccatcctttctgagctcgtttttaagcagtttggactttggaggatcggagatcgtggtcgatgatatcgagaaagaacatgggaagtgcttcgccgctcctactcattacattagttcttggtgtttgctttgccacatataatcttgtaacaatggtaatgcacaatagatctatttcaaaactgacaatctataactccgatggtggaatatttgttgatcccatcattgagatgcccgaaagtgtgaggaaattgaagcgtgccaaaatgcctttccatgttgccttaactgccactgatgctccctacagcaaatggcagtgtcgtatcatgtactattggtataagaagcagaaggacttacctgggtcggagatgggaggtttcactcgtattttacactctggaaatcctgacaatttgatgaacgagattcctactgtcatagtcgatcctcttccagcagggcttgatcggggatacatcgtcttaaatcgaccatgggcttttgtgcaatggctggaaaaggctacaattgaagaagaatacgtattgatggcagagcctgaccacatttttgtcactcccctacctaatctagcacatggaggatacccggctgcattcccctttttctacattaagccggatcagaacgaaaagttgttaaggaagtttttcccggaggagatgggaccggtgacaaatattgatccaatcggcaattcacccgtcattatcaagaaggaattattggaaaaaatcgctcctacttggatgaatgtttctttaaaaatgaaggatgatcccgagactgataaaacttttggatgggtgctacaaatgtatgcttatgctgtgacatctgctttgcatgacgtgcaacaagtacctaaaaaagacttcaagctt

SEQ ID NO: 552 - protein, 285 aa, Gossypium hirsutum
  misc_feature: Ceres CLONE ID no.1848736
  misc_feature: Bit score of 568.6 for HMM based on sequences of FIGURE 2.
  misc_feature: Functional Homolog Of Ceres SEEDLINE ID no. ME00045 at SEQ ID NO. 489
MISRKNMGSASPLLLITLVLGVCFATYNLVTMVMHNRSISKLTIYNSDGGIFVDPIIEMPESVRKLKRAKMPFHVALTATDAPYSKWQCRIMYYWYKKQKDLPGSEMGGFTRILHSGNPDNLMNEIPTVIVDPLPAGLDRGYIVLNRPWAFVQWLEKATIEEEYVLMAEPDHIFVTPLPNLAHGGYPAAFPFFYIKPDQNEKLLRKFFPEEMGPVTNIDPIGNSPVIIKKELLEKIAPTWMNVSLKMKDDPETDKTFGWVLQMYAYAVTSALHDVQQVPKKDFKL

SEQ ID NO: 553 - protein, 288 aa, Oryza sativa subsp. japonica
  misc_feature: Public GI ID no.125569872
  misc_feature: Bit score of 572.1 for HMM based on sequences of FIGURE 2.
  misc_feature: Functional Homolog Of Ceres SEEDLINE ID no. ME00045 at SEQ ID NO. 489
MPGWMRAAGSAGGGRRRPFHVALTATDAAYSRWQCRVMYYWYKRMQARPEGADMGGFTRVLHSGKPDALMGEIPTFVVDPLPAGKDHGYVVLNRPWAFVQWLEKAKIEEEYILMAEPDHIFVRPLPNLARDDPAAFPFFYITPSEHESVLRKYYPKERGPVTNIDPIGNSPVIIKKIQLEKIAPTWMNVSIQMKEDQETDKAFGWVLEMYAYAVASALHGVQHILRKDFMIQGVLTYGKIGEWRFDKRAYQDRPPPRNLTLPPPGVPESVDVGKYGREVIYALESIDV

SEQ ID NO: 554 - DNA, 1862 bp, Glycine max
  misc_feature: Ceres CLONE ID no.1645078
  misc_feature: Encodes the peptide sequence at SEQ ID NO 555
gtgagcttagtggagaaaagctagatatagccacctcttcaaagttcaaaacttccctttttggttctagtttgcatcttattcattttccctgcatttctatgcttcaaactattcttctttttttgtctaaattttccttctgtctttttttctgactcaaagtttgaacttttcctatgggggtaccttgaattgtgtagaacatcagttttttatgtgaaattttattctagttcaagtatgggctggtgttcttatttttacatggatttcagtttctaggatttttttctgcacaaatcactaatggcaacatttgaagcaaggagtgatctcaattgagtacatttttatgaacagaacctatgattgtggttagctttagtagggctgaatggggtttatttaacagctgttataggtagaatttagttggtttgagttttggagatttagagaatccatattagaataacaaaataagtaaagaatatgattgtgaggaaaaacaagccaagtgcaaggtcactacttatgctttttgttatggttcttgcttttctctttgtcacttataatttggtgtttataatcaaacaccatatgggtggaacttgggtagcagaagagttgaggtttcttgatcctgtgatcagcatgcctggaaaggtgatggcattagcaaattccaattcaaaatttcatgttgcagtgaccgcaaccgatgcggcttacagccaatggcaatgccggattatgtactattggtataagaaggttaaagatatgcctggatcagacatgggaaagttcaccagaatagtgcactcaggaaggcaagatcagttgatggatgagattcctacttttgtggttgatccacttcctgaaggcttggataggggttatgttgtcatgaatagaccatgggcttttgttcagtggctggagaaagcagacattgaggaagaatatattttgatggcagaacctgaccacatatttgtaaatcctttgccaaatttgactaatggaaaccaaccagcagggtatccatttttctatataaaaccagttaaacatgaaaaaatacttaggaaattctaccctaaggcgaatggtcctattactgctattgatcccattggcaattctcctgtaatcattcagaagtccttgctagaggaaatagctcccacatgggtgaatatttccttgcaaatgaaagatgatccggcaactgacgaaacttttggatgggtacttgaaatgtatgcgtacgctgtggcatcagctttgcacggtgtacggcatattcttcatgataacttcatgctccaggtttgtttatatgtgaatgggaattgcatctttacttgaggagggggaactaacatatgggaagattggagaatggcgttttaacaagagattttatctatcaggtcctccacccaaaaacctttccttaccccctcctggagttcctgaaagtgtggtgcagcttgtaaagatgatcaatgaggctactgctaacatacctaaatgggattctttaaatagaagctaaggaaaagaaaataaagtgcaaggtctaaggcccctcatgctagtggctactagatgagaaacaacaattctgattacatgaaaatagaccagtttaacccagagaagaactatgatgaacacagaaatatgtttttgtgctagctctgaaaatagttttttttttagcaagtaaattgttggtattgaaacatataaaaacaatgacagttgatcagacaacattttccaaaagatttttgtcagagggaaatcaatggaaacatcttgtcaaaaaaaaaaaaaaaaaa

SEQ ID NO: 555 - protein, 295 aa, Glycine max
  misc_feature: Ceres CLONE ID no.1645078
  misc_feature: Bit score of 475.5 for HMM based on sequences of FIGURE 2.
  misc_feature: Functional Homolog Of Ceres SEEDLINE ID no. ME00045 at SEQ ID NO. 489
MIVRKNKPSARSLLMLFVMVLAFLFVTYNLVFIIKHHMGGTWVAEELRFLDPVISMPGKVMALANSNSKFHVAVTATDAAYSQWQCRIMYYWYKKVKDMPGSDMGKFTRIVHSGRQDQLMDEIPTFVVDPLPEGLDRGYVVMNRPWAFVQWLEKADIEEEYILMAEPDHIFVNPLPNLTNGNQPAGYPFFYIKPVKHEKILRKFYPKANGPITAIDPIGNSPVIIQKSLLEEIAPTWVNISLQMKDDPATDETFGWVLEMYAYAVASALHGVRHILHDNFMLQVCLYVNGNCIFT

SEQ ID NO: 556 - DNA, 1324 bp, Panicum virgatum
  misc_feature: Ceres CLONE ID no.1790573
  misc_feature: Encodes the peptide sequence at SEQ ID NO 557
ttccctctactgcaccgagttctcctcttctccttcccggccgcgccacgcacggcacgccatcgccgcggcggaggcccgcgagaccggccggccagcgccggccttgtcgcggctcccaggtgactcccgcgatcggccccccgccggcgccgcggcgcacggctcgactgaagtagcggcgcccccgccccctggttgcgggtgtcgaggatgagcgggaggaagaatgccggcaggacctccccctggctgctcatcctcatctccgcagggtgcttcttcgcgacctataacttcctgacgatgcacggccggggccgggacgcgccgcgcaagcggttccacgttgcgctgacggcgacggacgcgctctacagccagtggcagtcccggatcatgcactactggtacaaggagatgagggacggccccggctccgacatgggcggcttcacacggatccttcactcggggaaacctgatgggttgatggacgagatacccaccatggtggtggacccgcttcctgaaggcacggataagggatacattgtcttaaataggccttgggcatttgtccagtggctgcagagagcaaagattgatgaagagtatatactaatggcggagccagatcatgtctttgtgaagcctttgccaaacttagctcatggtgatgaaccagcggcgtttccatttttctacatcaacccaactcagaatgagaagatattgcggaagttttttccagaagaaaaagggcctgtctcaaaaattgatcctattggcaactctccagttataataaagaaggcccaacttgagaagattgctccaacctggatgaatgtttcattaaaaatgaaagaggatcaggatacagacaaagcttttggatgggtcttggaaatgtatgcatatgctgttgctagtgcactgcatggtgtgcaccatagtctccgtaaagatttcatgattcaggtgctaagtcttgtcactagataattaatcgcatattgaagtgatggcagtttatatcattaaagatgtgcttgataataactgcagcctccttgggacctaaaaacagacaacacattcattatccattatacatatggatgtgattatacaatgaagggtcagctaacttatgggaaaattggtgaatggcgttttgacaaaagatcttatcttgaatcaccaccaccaagaaatctttcactaccccctcctggagttcctgaaagtgtggccacccttgtgaagatggtgaatgaggccactgcaaacattccagggtgggaggatgagagataat

SEQ ID NO: 557 - protein, 264 aa, Panicum virgatum
  misc_feature: Ceres CLONE ID no.1790573
  misc_feature: Bit score of 523.4 for HMM based on sequences of FIGURE 2.
  misc_feature: Functional Homolog Of Ceres SEEDLINE ID no. ME00045 at SEQ ID NO. 489
MSGRKNAGRTSPWLLILISAGCFFATYNFLTMHGRGRDAPRKRFHVALTATDALYSQWQSRIMHYWYKEMRDGPGSDMGGFTRILHSGKPDGLMDEIPTMVVDPLPEGTDKGYIVLNRPWAFVQWLQRAKIDEEYILMAEPDHVFVKPLPNLAHGDEPAAFPFFYINPTQNEKILRKFFPEEKGPVSKIDPIGNSPVIIKKAQLEKIAPTWMNVSLKMKEDQDTDKAFGWVLEMYAYAVASALHGVHHSLRKDFMIQVLSLVTR

SEQ ID NO: 558 - protein, 303 aa, Arabidopsis thaliana
  misc_feature: Public GI ID no.4567251
  misc_feature: Bit score of 423.8 for HMM based on sequences of FIGURE 2.
  misc_feature: Functional Homolog Of Ceres SEEDLINE ID no. ME00045 at SEQ ID NO. 489
MGFRGKYFFPILMTLSLFLIIRYNYIVSDDPPLRQELPGRRSASSGDDITYTVKTPSKKTKRLFHTAVTATDSVYSTWQCRVMYYWYNRFRDEPGSDMGGYTRILHSGRPDGLMDEIPTFVADPLPSGVDKKYESVLRKFFPKENGPISRIDPIGNSPVIVTKNALMKIAPTWMNVSLAMKNDPQTDKAFGWVLEMYAYAVSSALHGVSNILHKDFMIQPPWDTETKKTFIIHYTYGCDFDMKGKMMVGKIGEWRFDKRSYGDKPPPRNLTLPPRGVPESVVYIYSFKQNFSHLFPFGFLAQS

SEQ ID NO: 559 - protein, 384 aa, Arabidopsis thaliana
  misc_feature: Public GI ID no.30696058
  misc_feature: Bit score of 948.3 for HMM based on sequences of FIGURE 9.
  misc_feature (123)..(367): Pfam Name: Trehalose_PPase Pfam Description: Trehalose-phosphatase
  misc_feature: Functional Homolog Of Ceres SEEDLINE ID no. ME20095 at SEQ ID NO. 1129
MDMKSGHSSPVMTDSPPISNSRLTIRQNRLPYSSAAATAISQNNNLLLTVPRKKTGILDDVKSNGWLDAMKSSSPPPTILNKDNLSNDATDMTYREWMLKYPSALTSFEKIMSFAKGKRIALFLDYDGTLSPIVEEPDCAYMSSAMRSAVQNVAKYFPTAIISGRSRDKVYEFVNLSELYYAGSHGMDIMSPAGESLNHEHSRTVSVYEQGKDVNLFQPASEFLPMIDKVLCSLIESTKDIKGVKVEDNKFCISVHYRNVEEKNWTLVAQCVDDVIRTYPKLRLTHGRKVLEIRPVIDWDKGKAVTFLLESLGLNNCEDVLPIYVGDDRTDEDAFKVLRDGPNHGYGILVSAVPKDSNAFYSLRDPSEVMEFLKSLVTWKRSMG

SEQ ID NO: 560 - DNA, 944 bp, Zea mays
  misc_feature: Ceres CLONE ID no.444113
  misc_feature: Encodes the peptide sequence at SEQ ID NO 561
aaataagaattgtttaagctgttttttatgagtctagagatctgttgtaggacgaaacgagttctttgtcctgggcctttgtcactcttctctgtgtaacgacttcctccctttcctgccgcaccacgcaatcaccggggcggaggcggctgccggcgagcacttgggcgtctccggccaccgcctgcctcgttgtgatccaactaggaactcacccagcgctatctcccggcaggctccccgttgactcccgcgatttgttacccgctggcgctgccgcacacagctcaaaaggagtagcagcgcccctggttgccggttggagcgtcaaggatgagcgggaggaagaatgcgggcaaggtttccccctggttgctcgtcctcatctgtttagggtgcttctttgtgacctacaacctcctgacgatgcccagccggggacgggatgggccgcgcaagttcctcggcggcggcggggatcgccactcaactgcctcgttggggtcaggctctgattcggaccccgcgaagcggttccacgtcgcgcttacggcgacggacgcactgtacagtcagtggcagtcgcggataatgcactactggtataaggagatgagggaccgacctggttccgacatgggtggcttcactaggatccttcactcgggcaagcctgatggattgatggatgagatacccaccatggtggttgatccccttcctgaaggcaaggatcagggatatattgtcttaaataggccttgggcttttgtccagtggatccagaaagcaaagatcgtagaagagtatatattaatggcagagccagatcatgtctttgtgaagcctttgccaaacttatctcatggtgatgagccagcggcatttccatttttctacatcaaaccgactgagaatgagaagatattgagggagttttttcc

SEQ ID NO: 561 - protein, 203 aa, Zea mays
  misc_feature: Ceres CLONE ID no.444113
  misc_feature: Bit score of 194.3 for HMM based on sequences of FIGURE 2.
  misc_feature: Functional Homolog Of Ceres SEEDLINE ID no. ME00045 at SEQ ID NO. 489
MSGRKNAGKVSPWLLVLICLGCFFVTYNLLTMPSRGRDGPRKFLGGGGDRHSTASLGSGSDSDPAKRFHVALTATDALYSQWQSRIMHYWYKEMRDRPGSDMGGFTRILHSGKPDGLMDEIPTMVVDPLPEGKDQGYIVLNRPWAFVQWIQKAKIVEEYILMAEPDHVFVKPLPNLSHGDEPAAFPFFYIKPTENEKILREFF

SEQ ID NO: 562 - protein, 154 aa, Oryza sativa subsp. indica
  misc_feature: Public GI ID no.125525355
  misc_feature: Bit score of 101.2 for HMM based on sequences of FIGURE 2.
  misc_feature: Functional Homolog Of Ceres SEEDLINE ID no. ME00045 at SEQ ID NO. 489
MAYFSMGYVVLNRPWAFVQWLEKAKIEEEYILMAEPDHIFVRPLPNLARDDPAAFPFFYITPSEHESVLRKYYPKERGPVTNIDPIGNSPVIIKKGVLTYGKIGEWRFDKRAYQDRPPPRNLTLPPPGVPESVVTLVKMVNEATANLPGWDDGR

SEQ ID NO: 563 - DNA, 1143 bp, Sorghum bicolor
  misc_feature: Ceres ANNOT ID no.6028854
  misc_feature: Encodes the peptide sequence at SEQ ID NO 564
atgaacgcggcggcggcggcggcgcggaaggccgcgggcggcggcatggcgcgcgcgccggcgctggtgctagcgctggtggcggcgggggcgttcctgatctcctacaacttcttcgccatgctgtttcgcggcggcggcggcggaataggcggcgcggcggcgtcctcggggacgagggaccctgtggtggccatgccggcgtggatgcgcgaggcggcggacaccgaggcgcggcggcggccgttccatgtggcgctcacggccacggacgcgccctacagccggtggcagtgccgagtcatgtacttctggtacaagcggatgcaggcgcggccgggcggggaggccatgggcggcttcacgcgcgtgctgcactcgggaaagcccgacgggctcatggacgagatccccaccttcgtcgtcgacccgctgcccgctggcaaggaccatggatacgtggtcttgaatagaccgtgggcatttgtgcagtggcttcagaaagcaaagattgaagaagagtatatactaatggcagaaccagatcatatatttgtgaaacctttaccaaatttggcccatgacgatgatccagcagcatttcccttcttttacattacaccatcagaacatgaacaaattatccggaaatactatgccaaagaaagaggtcctgtcacagatattgatcctattggaaattctcctgtaatcattaagaagacacttcttgagaagattgcccccacatggatgaatgtgtcaattcaaatgaaagaggatgaagagacagataaaatttttggatgggtgctggaaatgtatgcatacgctgttgctagcgcattgcatggggttcagcatatccttcgtaaagatttcatgatccagccaccctttgatacaaagctcgggaatacatttataatccacttcacttatggatgtgactattcactaaagggtgaactgacctatgggaaagttggtgaatggcgatttgacaaaagatcattcccagatgggccaccaccaagaaattttacattgccccctcctggagtcccagaaagtgtggttactctagtaaaaatggtcaatgaagctagtgcaaacctacctcggtgggatgatggaatataa

SEQ ID NO: 564 - protein, 380 aa, Sorghum bicolor
  misc_feature: Ceres ANNOT ID no.6028854
  misc_feature: Bit score of 897.1 for HMM based on sequences of FIGURE 2.
  misc_feature: Functional Homolog Of Ceres SEEDLINE ID no. ME00045 at SEQ ID NO. 489
MNAAAAAARKAAGGGMARAPALVLALVAAGAFLISYNFFAMLFRGGGGGIGGAAASSGTRDPVVAMPAWMREAADTEARRRPFHVALTATDAPYSRWQCRVMYFWYKRMQARPGGEAMGGFTRVLHSGKPDGLMDEIPTFVVDPLPAGKDHGYVVLNRPWAFVQWLQKAKIEEEYILMAEPDHIFVKPLPNLAHDDDPAAFPFFYITPSEHEQIIRKYYAKERGPVTDIDPIGNSPVIIKKTLLEKIAPTWMNVSIQMKEDEETDKIFGWVLEMYAYAVASALHGVQHILRKDFMIQPPFDTKLGNTFIIHFTYGCDYSLKGELTYGKVGEWRFDKRSFPDGPPPRNFTLPPPGVPESVVTLVKMVNEASANLPRWDDGI

SEQ ID NO: 565 - DNA, 795 bp, Sorghum bicolor
  misc_feature: Ceres ANNOT ID no.6115356
  misc_feature: Encodes the peptide sequence at SEQ ID NO 566
atgagcgggaggaagaatgcgggcaaggtttccccctggttgctcggcctcatctctttaggatgcttctttgtgacctacaacctcctgacgatgcacggccggggacgggatgggccgcgcaagttcctcggcggcggcgaggatcacgactcaacgggctccggttcggaccccgcgaagcggttccacgtcgcgcttacggcgacggacgcactgtacagtcagtggcagtcgcggataatgcactactggtacaaggagatgagggaccgacctggctctgacatgggtggcttcactaggatccttcactcggggaagcctgatggattgatggatgagatacccaccatggtggttgacccccttcctgaaggcaaggataagggatatattgtcttaaataggccttgggcgtttgtccagtggatccagagagcaaagatcgtagaagattatatactaatggcagagccagatcatgtctttgtgaagcctttgccaaacttagcgcatggtgatgaaccggcagcatttccgtttttctacatcaaaccaactgataatgagaagatattgaggaaattttttccagaagaaaaagggcctgtttcaaatattgatcctattggcaactctccagttataatcaagaaggctcagcttgagaagattgctccaacctggatgaatgtttcattaaaaatgaaagaggatcaggagacagacaaagcatttggatgggtcttggaaatgtcagtgctgagaagtcttgtcactagatacagatag

SEQ ID NO: 566 - protein, 264 aa, Sorghum bicolor
  misc_feature: Ceres ANNOT ID no.6115356
  misc_feature: Bit score of 450.2 for HMM based on sequences of FIGURE 2.
  misc_feature: Functional Homolog Of Ceres SEEDLINE ID no. ME00045 at SEQ ID NO. 489
MSGRKNAGKVSPWLLGLISLGCFFVTYNLLTMHGRGRDGPRKFLGGGEDHDSTGSGSDPAKRFHVALTATDALYSQWQSRIMHYWYKEMRDRPGSDMGGFTRILHSGKPDGLMDEIPTMVVDPLPEGKDKGYIVLNRPWAFVQWIQRAKIVEDYILMAEPDHVFVKPLPNLAHGDEPAAFPFFYIKPTDNEKILRKFFPEEKGPVSNIDPIGNSPVIIKKAQLEKIAPTWMNVSLKMKEDQETDKAFGWVLEMSVLRSLVTRYR

SEQ ID NO: 567 - DNA, 441 bp, Arabidopsis thaliana
  misc_feature: Ceres SEEDLINE ID no.ME02190
  misc_feature: Encodes the peptide sequence at SEQ ID NO. 568
gaagtaggaaaaaacaaaaccaaagaagatctaaagagataaagagaatgatgaagaagcaagtgacgatagtggcggctcttctgattatgatggctttatgttccagcttgaatatggtggccgaggctcaattaggccccggagactgctacgacggttgctccaccgcctgcgtccaacgtgacccgagaaagacgtcccgatgcgatcgcaagtgttccattcgttgtggtccagatgctgccagggcaagtgggagtggtgtttaaactttatattttaccaagatccatgcatttggatttaattatgttgtaatcttatttaataatcgtatctctggaaaacatattctgtaatttttatgtagttattggaaccaataaataataacagctacaatggtggaattaagtacactagtgctggtttgtaacc

SEQ ID NO: 568 - protein, 74 aa, Arabidopsis thaliana
  misc_feature: Ceres SEEDLINE ID no.ME02190
  misc_feature: Bit score of 196.9 for HMM based on sequences of FIGURE 3.
MMKKQVTIVAALLIMMALCSSLNMVAEAQLGPGDCYDGCSTACVQRDPRKTSRCDRKCSIRCGPDAARASGSGV

SEQ ID NO: 569 - protein, 74 aa, Arabidopsis thaliana
  misc_feature: Public GI ID no.79318519
  misc_feature: Bit score of 186.8 for HMM based on sequences of FIGURE 3.
  misc_feature: Functional Homolog Of Ceres SEEDLINE ID no. ME02190 at SEQ ID NO. 568
MMKKQVTIVAALLIMMALCSSLNMVAEAQLGPGDCYDGCSTACVQRDREKTSRCDRKCSIRCGPDAARASGSGV

SEQ ID NO: 570 - protein, 85 aa, Arabidopsis thaliana
  misc_feature: Public GI ID no.79318537
  misc_feature: Bit score of 184.4 for HMM based on sequences of FIGURE 3.
  misc_feature: Functional Homolog Of Ceres SEEDLINE ID no. ME02190 at SEQ ID NO. 568
MMKKQVTIVAALLIMMALCSSLNMVAEAQLGPGDCYDGCSTACVQRDPRKTSRCDRKCSIRCGPGKHYETGYVPTDAARASGSGV

SEQ ID NO: 571 - DNA, 400 bp, Brassica napus
  misc_feature: Ceres CLONE ID no.956998
  misc_feature: Encodes the peptide sequence at SEQ ID NO 572
agagaaaggaaaaaaaaaatcaaagatctaaacaatagaagaatgatgaagaagcaagtgacaatagtggcggctcttctgattctggtggctttatcttccaatttggatatggttgctgaggctcagttaggccctggagactgctacgacggttgctccaccgcctgcgtccagcgcgactcgagaaagacgtcccgatgcgatcgcaagtgctctattcggtgtggcccagatgctaaaaaggcaggagagactggtgcttaaactttgatatttactaagatccatattttggatttaataatgttgtaatcttcgtttcaaaattttatctctgcaaaacatattacgtattgtttatgttgttattgtagtcaataaccaataattgctgctc

SEQ ID NO: 572 - protein, 74 aa, Brassica napus
  misc_feature: Ceres CLONE ID no.956998
  misc_feature: Bit score of 201.1 for HMM based on sequences of FIGURE 3.
  misc_feature: Functional Homolog Of Ceres SEEDLINE ID no. ME02190 at SEQ ID NO. 568
MMKKQVTIVAALLILVALSSNLDMVAEAQLGPGDCYDGCSTACVQRDSRKTSRCDRKCSIRCGPDAKKAGETGA

SEQ ID NO: 573 - DNA, 532 bp, Brassica napus
  misc_feature: Ceres CLONE ID no.978154
  misc_feature: Encodes the peptide sequence at SEQ ID NO 574
gaaaggaaaaaaaaaatcaaagatctaaacaatagaagaatgatgaagaagcaagtgacaatagtggcggctcttctgattctggtggctttatcttccaatttggatatggttgctgaggctcagttaggccctggagactgctacgacggttgctccaccgcctgcgtccagcgcgactcgagaaagacgtcccgatgcgatcgcaagtgctctattcggtgtggcccaggtaattaatgaaccggatccttatatctggtacatttgtataatcggtaacaactctaactggtcggttagctttgtatgttatcatgcatgaaacagactaacagggtcggaatttatgatctatgatctatcatacttaaagcctattagaatcagatcatacgtcgtgagatgacttggtttagcatctgagtgaaaccaaaaaaggacttgaaactttttttttttttttgtaattgcagatgctaaaaaggcaggararactggtgcttaaactttgatatttactaagatccat

SEQ ID NO: 574 - protein, 66 aa, Brassica napus
  misc_feature: Ceres CLONE ID no.978154
  misc_feature: Bit score of 167.5 for HMM based on sequences of FIGURE 3.
  misc_feature: Functional Homolog Of Ceres SEEDLINE ID no. ME02190 at SEQ ID NO. 568
MMKKQVTIVAALLILVALSSNLDMVAEAQLGPGDCYDGCSTACVQRDSRKTSRCDRKCSIRCGPGN

SEQ ID NO: 575 - DNA, 459 bp, Brassica napus
  misc_feature: Ceres CLONE ID no.1035628
  misc_feature: Encodes the peptide sequence at SEQ ID NO 576
gagagagaaagagaaagaaaccagaaacaataacaaagaagatctaaagaaaaataagaatgatgaaaaagcaagtgacaatagtggcggctcttctgatcataatggctttttctttcaacttagatatggttgcggaggctcagttaggccccggagactgctacgatggttgctccacaggctgcgtccagcgcgactcgagaaagatggcccgatgcgatcgcaagtgctccattcggtgcggcccagatgctaaaaaggcaagaaagactggtgcataaatctttatatccacgatgatccaattagattcaatgatgttgtaatctccgtttcataactgtatcgcttcaaaacatatttcctattgtgtgttgttatcgtaatcagtcaataaggcaatacagctacaatgcttgatttcacttctagtacaataatgtattaacaactttg

SEQ ID NO: 576 - protein, 74 aa, Brassica napus
  misc_feature: Ceres CLONE ID no.1035628
  misc_feature: Bit score of 182.4 for HMM based on sequences of FIGURE 3.
  misc_feature: Functional Homolog Of Ceres SEEDLINE ID no. ME02190 at SEQ ID NO. 568
MMKKQVTIVAALLIIMAFSFNLDMVAEAQLGPGDCYDGCSTGCVQRDSRKMARCDRKCSIRCGPDAKKARKTGA

SEQ ID NO: 577 - DNA, 479 bp, Glycine max
  misc_feature: Ceres CLONE ID no.695006
  misc_feature: Encodes the peptide sequence at SEQ ID NO 578
agtgttttacgagtaagttaagataagatgaagaagatggtggttgcaatgatgcttatatttcttctaatttctacgcaaatggagagcgttgagcccgatgctgcagattgcttggatggttgcactactgcctgtgttcaaagcgactcgaggcttcaagcacggtgtgatcgcaagtgcagcattagatgcggtccagattccacaatcaaggaggacatgggttgagtatgtaaagtcacagcgcaagcaagcagtgtctgcttgaccaacaccgtgtcttttttagtccttgcttatatatgatataacattttaaagtcttcccgatgctgtagtagcatccaaataaacatggatgatagacagctttttaagatcaaatttgttagggtagatgctttgtaacttgaaggaatgtgatatgaatgaatgtttcattatggcaataaatacatcactgccaatgtgactat

SEQ ID NO: 578 - protein, 67 aa, Glycine max
  misc_feature: Ceres CLONE ID no.695006
  misc_feature: Bit score of 177.9 for HMM based on sequences of FIGURE 3.
  misc_feature: Functional Homolog Of Ceres SEEDLINE ID no. ME02190 at SEQ ID NO. 568
MKKMVVAMMLIFLLISTQMESVEPDAADCLDGCTTACVQSDSRLQARCDRKCSIRCGPDSTIKEDMG

SEQ ID NO: 579 - DNA, 493 bp, Glycine max
  misc_feature: Ceres CLONE ID no.464169
  misc_feature: Encodes the peptide sequence at SEQ ID NO 580
gactagtgaaaaaggatacagaagagaagggaaagttaagatgaagaagatggtggctgcaatgatgctttttcttctcatttctacgcaaatgaagagcgttgagccggatgctgcggattgcttggatggttgcagtactgcctgtgttcaaagcgactcgaggcttcaagcacggtgtgaacgcaaatgcagcattagatgcggtccagattccacaatcaaggaggacatgagttgatttgagtatgtaaagtcacagcgcaagcaagcagtgtttcatcaccatagtcttatttagtccttgcttatacatataataacattttaaggtttgtctgatgttgtagtaacatctaaataaacatggatggctttttaagatcaaattggttagggtagatgttgcgacttgaaggaatgctagctgatgtgaatgagtgttttatcaaggcaataaatacatcaccaattaatatcactatacatttgc

SEQ ID NO: 580 - protein, 66 aa, Glycine max
  misc_feature: Ceres CLONE ID no.464169
  misc_feature: Bit score of 151.2 for HMM based on sequences of FIGURE 3.
  misc_feature: Functional Homolog Of Ceres SEEDLINE ID no. ME02190 at SEQ ID NO. 568
MKKMVAAMMLFLLISTQMKSVEPDAADCLDGCSTACVQSDSRLQARCERKCSIRCGPDSTIKEDMS

SEQ ID NO: 581 - DNA, 459 bp, Populus balsamifera subsp. trichocarpa
  misc_feature: Ceres ANNOT ID no.1474075
  misc_feature: Encodes the peptide sequence at SEQ ID NO 582
atgatgaggaaagtattggttgcagtgttgattgtgagcatggtcgcttctcattttgagaacgtagcgtctgatgcttctgattgcatggacgcatgtaccaccggctgcgttcaatcaaacacaagacttacgagccgctgtgatatcaaatgtgggataagatgcggtccagattctgaagtcgaagatcacacagaaaggagagaatcacttctgaaacttcagctgctaaaaacacagattcatctatcaagctataaggcaccagtaaagtacacactgcaatctgcatcgtggaacaagcaattaaaggaaatcatgataaacgaagtggaagaggagagaggccatattgtcatcttctggaacgaagaaccagaagaaattcctcagaatcctaaaacatcaaaacagcaaataacctccatggaggagacaatttcattagccagttaa

SEQ ID NO: 582 - protein, 152 aa, Populus balsamifera subsp. trichocarpa
  misc_feature: Ceres ANNOT ID no.1474075
  misc_feature: Bit score of 168.4 for HMM based on sequences of FIGURE 3.
  misc_feature: Functional Homolog Of Ceres SEEDLINE ID no. ME02190 at SEQ ID NO. 568
MMRKVLVAVLIVSMVASHFENVASDASDCMDACTTGCVQSNTRLTSRCDIKCGIRCGPDSEVEDHTERRESLLKLQLLKTQIHLSSYKAPVKYTLQSASWNKQLKEIMINEVEEERGHIVIFWNEEPEEIPQNPKTSKQQITSMEETISLAS

SEQ ID NO: 583 - DNA, 201 bp, Populus balsamifera subsp. trichocarpa
  misc_feature: Ceres ANNOT ID no.1527488
  misc_feature: Encodes the peptide sequence at SEQ ID NO 584
atgaggaaagtattggttgcagtgttgattgtgagcatggtcgcttctcattttgagaacgtagcgtctgatgcttctgattgcatggacgcatgtaccaccggctgcgttcaatcaaacacaagacttacgagccgctgtgatatcaaatgtgggataagatgcggtccagattctgaagtcgaagatcacacaggttaa

SEQ ID NO: 584 - protein, 66 aa, Populus balsamifera subsp. trichocarpa
  misc_feature: Ceres ANNOT ID no.1527488
  misc_feature: Bit score of 172.6 for HMM based on sequences of FIGURE 3.
  misc_feature: Functional Homolog Of Ceres SEEDLINE ID no. ME02190 at SEQ ID NO. 568
MRKVLVAVLIVSMVASHFENVASDASDCMDACTTGCVQSNTRLTSRCDIKCGIRCGPDSEVEDHTG

SEQ ID NO: 585 - DNA, 267 bp, Populus balsamifera subsp. trichocarpa
  misc_feature: Ceres ANNOT ID no.1474073
  misc_feature: Encodes the peptide sequence at SEQ ID NO 586
atgatgaggaaaatattggttgctgtgttgattgtgagcatggtcgcttctcattttgagaacgtagcgtctgatgcttctgattgcaatgacgcatgtaccaccggctgcgttcaatcaaacacgagacttatgcgccgctgtgagatcaaatgtgggataagatgcggtccagattctgaagtcgaagatcacacagtgttgatattctttgtattagaagtaagaagggaagggggaattagggctatcaaatctcaaatttga

SEQ ID NO: 586 - protein, 88 aa, Populus balsamifera subsp. trichocarpa
  misc_feature: Ceres ANNOT ID no.1474073
  misc_feature: Bit score of 151.3 for HMM based on sequences of FIGURE 3.
  misc_feature: Functional Homolog Of Ceres SEEDLINE ID no. ME02190 at SEQ ID NO. 568
MMRKILVAVLIVSMVASHFENVASDASDCNDACTTGCVQSNTRLMRRCEIKCGIRCGPDSEVEDHTVLIFFVLEVRREGGIRAIKSQI

SEQ ID NO: 587 - DNA, 201 bp, Populus balsamifera subsp. trichocarpa
  misc_feature: Ceres ANNOT ID no.1527486
  misc_feature: Encodes the peptide sequence at SEQ ID NO 588
atgaggaaaatattggttgctgtgttgattgtgagcatggtcgcttctcattttgagaacgtagcgtctgatgcttctgattgcaatgacgcatgtaccaccggctgcgttcaatcaaacacgagacttatgcgccgctgtgagatcaaatgtgggataagatgcggtccagattctgaagtcgaagatcacacaggttaa

SEQ ID NO: 588 - protein, 66 aa, Populus balsamifera subsp. trichocarpa
  misc_feature: Ceres ANNOT ID no.1527486
  misc_feature: Bit score of 152.9 for HMM based on sequences of FIGURE 3.
  misc_feature: Functional Homolog Of Ceres SEEDLINE ID no. ME02190 at SEQ ID NO. 568
MRKILVAVLIVSMVASHFENVASDASDCNDACTTGCVQSNTRLMRRCEIKCGIRCGPDSEVEDHTG

SEQ ID NO: 589 - DNA, 1273 bp, Arabidopsis thaliana
  misc_feature: Ceres SEEDLINE ID no.ME02549
  misc_feature: Encodes the peptide sequence at SEQ ID NO. 590
accaacacacaaagattccattacaaataaacaattttcatatatatctataacaaaaaaaaacaatggcgacctcaagcatgaagagcattccaatggcgatcccaagtttctccatgtgtcacaagctcgagctccttaaagaaggcaaaactcgcgacgtcccgaaagccgaagaagatgaagggctaagctgcgagttccaagagatgttggattctcttcctaaggagagaggatggagaactcgttacctttacctattccaagggttttggtgccaagccaaagagattcaagccatcatgtctttccaaaaacatttccaatccctcgaaaacgacgtcgttctcgccaccatacctaaatccggtacaacctggctaaaagctttaactttcaccatccttaaccgtcaccggtttgatccggttgcctcgagtaccaaccaccctcttttcacttccaaccctcatgaccttgtacctttcttcgagtacaagctttacgccaacggagatgttcccgatctctcgggtctagccagtccaagaacgttcgcaacccacttaccgttcggttccttaaaggaaacgatcgagaaacccggtgtgaaggtcgtgtacttgtgccggaacccgtttgacacattcatctcttcgtggcattacaccaacaacatcaaatccgagtcagtgagcccagtcttgctagaccaagcttttgatctgtattgccggggagtgatcgggtttggcccgttttgggaacacatgttgggatactggagagagagcttgaagagaccagagaaagtcttctttttaaggtacgaggatctcaaagacgacatcgagaccaacttgaagaggcttgcaactttcttagagcttcctttcaccgaagaagaggaacgaaagggagttgtgaaggctatcgccgagctgtgtagcttcgagaatctgaagaagttggaggtgaacaagtcaaacaagtcgatcaagaactttgagaatcgattcttgtttcggaaaggagaagtgagtgattgggttaactatttgtcaccttcacaagtggaaagattgtcagccttagtggatgacaagttaggtggatctggtctcactttcaggttgagctaaatataaggccacgtgcccccatttctactcttgttctgagggcctactatatacgttaagctaagttaaggcagttgtattgttgttacagatagacatcgaagcaacgtaacgtccataattaagtc

SEQ ID NO: 590 - protein, 359 aa, Arabidopsis thaliana
  misc_feature: Ceres SEEDLINE ID no.ME02549
  misc_feature: Bit score of 938.6 for HMM based on sequences of FIGURE 4.
  misc_feature (91)..(353): Pfam Name: Sulfotransfer_1 Pfam Description: Sulfotransferase domain
MATSSMKSIPMAIPSFSMCHKLELLKEGKTRDVPKAEEDEGLSCEFQEMLDSLPKERGWRTRYLYLFQGFWCQAKEIQAIMSFQKHFQSLENDVVLATIPKSGTTWLKALTFTILNRHRFDPVASSTNHPLFTSNPHDLVPFFEYKLYANGDVPDLSGLASPRTFATHLPFGSLKETIEKPGVKVVYLCRNPFDTFISSWHYTNNIKSESVSPVLLDQAFDLYCRGVIGFGPFWEHMLGYWRESLKRPEKVFFLRYEDLKDDIETNLKRLATFLELPFTEEEERKGVVKAIAELCSFENLKKLEVNKSNKSIKNFENRFLFRKGEVSDWVNYLSPSQVERLSALVDDKLGGSGLTFRLS

SEQ ID NO: 591 - protein, 333 aa, Vitis vinifera
  misc_feature: Public GI ID no.147822456
  misc_feature: Bit score of 704.9 for HMM based on sequences of FIGURE 4.
  misc_feature (68)..(327): Pfam Name: Sulfotransfer_1 Pfam Description: Sulfotransferase domain
  misc_feature: Functional Homolog Of Ceres SEEDLINE ID no. ME02549 at SEQ ID NO. 590
MGRTQFPKSQSAAEDAEELSHECKELLLSLPKERGWRTPHIYLYQGFWCQPKEIQAITNFQHHFQARDTDLILATMPKAGTTWLKAMAFAILNRKPIPVSTTHPLHTSNPHDLVPFLEYKLYANNNFPDLSKLPQPRLFATHVPFASLPESITKSNSRVVYMCRNPLDAFASSWHFLMKARPESLGPISIEEGFQMYCKGSMAFGPFWKHMLGYWKESIERPHKVLFLKYEDTKEDIIFQLKRLAKFLGVPFSLEEERKGVIEEIARLCSFENLKNLEVNQSGKSIGYFENKDLFRKGVVGDWVNLLTPLMAKQLVQVMEEKLEGSDLSFKVF

SEQ ID NO: 592 - protein, 333 aa, Medicago truncatula
  misc_feature: Public GI ID no.144923935
  misc_feature: Bit score of 736.8 for HMM based on sequences of FIGURE 4.
  misc_feature (60)..(326): Pfam Name: Sulfotransfer_1 Pfam Description: Sulfotransferase domain
  misc_feature: Functional Homolog Of Ceres SEEDLINE ID no. ME02549 at SEQ ID NO. 590
MASTYNTENKVIHDYNNLILSLPRENGCETEYMYFFHGFWCPSYLIQSVNTFQNKFHAKDNDIVVASMPKSGTTWLKGLAYAIVNRQHFTSLENNNHPLLLFNPHELVPLFEVNLYGGKDILLPQIDVSNMIEPRLFGTHIPFLSLPKSVKESSCKIIYICRNPFDTFVSYWNYINKVRSKKSLTELTLEESFERYCKGICLFGPFWDNMLGYLKESIERPHKVLFLKYEDLKEDVNFHIKRIAEFVGFPFTQEEENNGVVENIIKLCSFESMKESKGNQSETVSTIYEKKFFFRKGEIGDWVNYFSPSMIERLSKVIEEKLSGSNLSFKGGP

SEQ ID NO: 593 - protein, 347 aa, Medicago truncatula
  misc_feature: Public GI ID no.140038730
  misc_feature: Bit score of 803.5 for HMM based on sequences of FIGURE 4.
  misc_feature (76)..(340): Pfam Name: Sulfotransfer_1 Pfam Description: Sulfotransferase domain
  misc_feature: Functional Homolog Of Ceres SEEDLINE ID no. ME02549 at SEQ ID NO. 590
MASTDLTNMKEDQSRDGQETISEENKVIHDYNNLILSLPRENGCDTQYFYFYHGFWCPSTLIQSVNSFQNNFHAKDSDIVVASMPKSGTTWLKGLAYAIVNRQHFTSLENNHPLLSFNPHELVPHFEVSGNNTDGQMPQIDVPNMVEPRLYGTHMPFPSLPKSIQESNCKIIYICRNPFDTFVSYWTFINKLRLKKSLTELTLEESFERYCKGICFFGPFWDNMLGYLKESIERPDRVLFLKYEDLKEDVNFHTKRIAEFVGFPFTEEEENNGVIENIIKLCSFESMKESSENKSGTAALKIEREFFFRKGEIGDWVNYLSPSMIKKLSKVMEEKLSGSSLSFKGCP

SEQ ID NO: 594 - protein, 367 aa, Oryza sativa subsp. japonica
  misc_feature: Public GI ID no.78708014
  misc_feature: Bit score of 317.5 for HMM based on sequences of FIGURE 4.
  misc_feature (93)..(363): Pfam Name: Sulfotransfer_1 Pfam Description: Sulfotransferase domain
  misc_feature: Functional Homolog Of Ceres SEEDLINE ID no. ME02549 at SEQ ID NO. 590
MPLVSAAAGCQRGPVPFKDVAAVVAGDDGAAAAMAHRPLADPEDEDHDELIATLPCKPPTPLMRRMRLYRGGWFPEKWLPAIMAFRRRFEARDGDVVVASLPKCGTTWLKALAFATAVRGTYPPPPVAGSDDEGNRRHPLLRLNPHECVPFLESVYSTMEEESKLDATPSPRLLSTHLPYSVLPASITDSSRCKIIYVCRQPKDMLISFWHFINRDKSRDVSSSYVWESVRECTYFGSPIWDHILGYWNASKVKPDNVLILKYEDMKRNPTENVEKIAEFIGQPFSNSEKEASIVDNIVELCSFEKMKALGASMAGSQKVISSEFPNDSFFRKGAIGDWVNHVTPEMAESLDKFLSEKFDGSGFTFM

SEQ ID NO: 595 - protein, 334 aa, Oryza sativa subsp. japonica
  misc_feature: Public GI ID no.115481362
  misc_feature: Bit score of 317.5 for HMM based on sequences of FIGURE 4.
  misc_feature (60)..(330): Pfam Name: Sulfotransfer_1 Pfam Description: Sulfotransferase domain
  misc_feature: Functional Homolog Of Ceres SEEDLINE ID no. ME02549 at SEQ ID NO. 590
MAHRPLADPEDEDHDELIATLPCKPPTPLMRRMRLYRGGWFPEKWLPAIMAFRRRFEARDGDVVVASLPKCGTTWLKALAFATAVRGTYPPPPVAGSDDEGNRRHPLLRLNPHECVPFLESVYSTMEEESKLDATPSPRLLSTHLPYSVLPASITDSSRCKIIYVCRQPKDMLISFWHFINRDKSRDVSSSYVWESVRECTYFGSPIWDHILGYWNASKVKPDNVLILKYEDMKRNPTENVEKIAEFIGQPFSNSEKEASIVDNIVELCSFEKMKALGASMAGSQKVISSEFPNDSFFRKGAIGDWVNHVTPEMAESLDKFLSEKFDGSGFTFM

SEQ ID NO: 596 - protein, 334 aa, Oryza sativa subsp. indica
  misc_feature: Public GI ID no.125531350
  misc_feature: Bit score of 316.7 for HMM based on sequences of FIGURE 4.
  misc_feature (60)..(330): Pfam Name: Sulfotransfer_1 Pfam Description: Sulfotransferase domain
  misc_feature: Functional Homolog Of Ceres SEEDLINE ID no. ME02549 at SEQ ID NO. 590
MAHRPLADPEDEDHDELIATLPCKPPTPLMRRMRLYRGGWFPEKWLPAIMAFRRRFEARDGDVVVASLPKCGTTWLKALAFATAARGTYPPPPVAGGDDEGNRRHPLLRLNPHECVPFLESVYSTMEEESKLDATPSPRLLSTHLPYSVLPASITDSSRCKIIYVCRQPKDMLISFWHFINRDKSRDVSSSYVWESVRECTYFGSPIWDHILGYWNVSKVKPDNVLILKYEDMKRNPTENVEKIAEFIGQPFSNSEKEASIVDNIVELCSFEKMKALGASMAGSQKVISSEFPNDSFFRKGAIGDWVNHVTPEMAESLDKLLSEKFDGSGFTFM

SEQ ID NO: 597 - protein, 346 aa, Oryza sativa subsp. indica
  misc_feature: Public GI ID no.125525598
  misc_feature: Bit score of 397.5 for HMM based on sequences of FIGURE 4.
  misc_feature (71)..(337): Pfam Name: Sulfotransfer_1 Pfam Description: Sulfotransferase domain
  misc_feature: Functional Homolog Of Ceres SEEDLINE ID no. ME02549 at SEQ ID NO. 590
MASPPSLLPSAGEDDESQREVFEQLRQLVSTYPTVPSGLDTPYYRHPDGWYTFLPAMVSVMVAQRHFTARDTDIIIATFPKCGTTWLKALLFATVHRDGGGAGGVEDDAALAQLRARNPHQLVPFLEIQVYVRDRAPDLSSLPAPRLLATHIPRPSLPASVAISGCKVVYMCRDPKDCLVSLWHFLDAQRREPRGDVGEDFRLFCDGVSLVGPYWDHVLAYWRWHVERPGQVLFMTYEELSGDTLGQLRRLAEFVGRPFTGEERAARVDEAIVKACSFESLAGAEVNRSGTIELMEEPMRNAEFFRRGVVGGWPNYLSPEMATRIDEITESKFRGSGLVLPTMMTM

SEQ ID NO: 598 - protein, 338 aa, Oryza sativa subsp. japonica
  misc_feature: Public GI ID no.77548630
  misc_feature: Bit score of 344.2 for HMM based on sequences of FIGURE 4.
  misc_feature (74)..(325): Pfam Name: Sulfotransfer_1 Pfam Description: Sulfotransferase domain
  misc_feature: Functional Homolog Of Ceres SEEDLINE ID no. ME02549 at SEQ ID NO. 590
MAPSFPLSFAPQSADEATAHKEIYDQLRQAVETFPTAPNSSTSFTYSRHPDGWYTFPEGVVSAMVIKSHLTARTTDIFMVTFPKSGTTWLKALLHSALHRRADDLAAHSPHQLVPFLETQVFIKDRIPDLSSLPAPRLLMTHIPSQSLPDSVADSSCKVVYLCRDPKDCFISLWHFLNRFRPWDINEAHRNFCDGVSLFGPYWEHVLGYWRWHVKRPSQVLFLTYEELTTDTLGQLRRLAEFVGRPFMVKEQEIEVDRKIVEACAMESLSRLEVNQSGTTDMVDKTYANNIFFRRGVVGDWRNHLTPEMARRIDEITEIKFKGSGLLLHPQFLQAKRE

SEQ ID NO: 599 - protein, 346 aa, Oryza sativa subsp. japonica
  misc_feature: Public GI ID no.46798895
  misc_feature: Bit score of 400.2 for HMM based on sequences of FIGURE 4.
  misc_feature (71)..(337): Pfam Name: Sulfotransfer_1 Pfam Description: Sulfotransferase domain
  misc_feature: Functional Homolog Of Ceres SEEDLINE ID no. ME02549 at SEQ ID NO. 590
MASPPSLLPSAGDDDESQREVYEQLRQLVSTYPTVPSGLDTPYYRHPDGWYTFLPAMVSVMVAQRHFTARDTDIIIATFPKCGTTWLKALLFATVHRDGGGAGGVEDDAALAQLRARNPHQLVPFLEIQVYVRDRAPDLSSLPAPRLLATHIPRPSLPASVAISGCKVVYMCRDPKDCLVSLWHFLDAQRPEPRGDVGEDFRLFCDGVSLVGPYWDHVLAYWRWHVERPGQVLFMTYEELSGDTLGQLRRLAEFVGRPFTGEERAARVDEAIVKACSFESLAGAEVNRSGTIELMEEPMRNAEFFRRGVVGGWPNYLSPEMATRIDEITESKFRGSGLVLPTMMTM

SEQ ID NO: 600 - protein, 391 aa, Oryza sativa subsp. indica
  misc_feature: Public GI ID no.125564653
  misc_feature: Bit score of 299.8 for HMM based on sequences of FIGURE 4.
  misc_feature (90)..(361): Pfam Name: Sulfotransfer_1 Pfam Description: Sulfotransferase domain
  misc_feature: Functional Homolog Of Ceres SEEDLINE ID no. ME02549 at SEQ ID NO. 590
MVAAAAAAAEAKAAIGVATPTPTAAPCGSTTTPRDADVDDKMTIVGHPAASLPLETRWPPFPLRRLGGFWMPESLLPAVAALHTSFAPAPDGVLLASFPKSGTSWLKALAFAAANRAAHPPSDADHPLRRRNPHDCVEFFEMRPDEHTGATSDGIAVDAASPPPPPRVLATHLPYSLLPKRITAGDGCRIIYICRDPKDTLVSFWHFSKKMAATMAVDAGAFTFDEAFELFCDGNCTGGPQWRHVLEYWEASRRCPGKVLFLRYEDMLRRPASGLRKMAEFMGCPFAAAEEAAGVADAIVELCSLDELRSLEVNRNGTDVLGLKNESYFREGVAGDWRNHMTPAMAARLDKIVNDATRGSGLSLANATPSPPMHENEIKGNLTIYHSQNDI

SEQ ID NO: 601 - DNA, 1372 bp, Zea mays
  misc_feature: Ceres CLONE ID no.998865
  misc_feature: Encodes the peptide sequence at SEQ ID NO 602
acgcgaccagtttgccggcaccaacacggcctgctgctccgcattttgatgactatttctgtctgaaaactgtctctgtcagttgttcattcaggctgctgcagcaagcaactggatgatggcttccaggcagtcagggaacaatgcacaagaagcagcatcaccattggcgagtcctcctcactccaacatagccagcatcatcccttcgctgcccctcgagaccaggtgcccaccgttccctctccgccggtatgccaacttttgggtgcctgaggtaatattgaaggcagaccaccccggcattcattcctgcttcaagccgagacccaccgacgtgttcgtcgcaagcttccccaagtctggcaccacttggctcaaggccctcgccttcgcgacgctgaagcgttccatgcatccgccattggatggcgaccatccactgcgtcgttgcaaccctcatgactgtgtcaggttcctcgatgctaatttcaaccagcagaaggatgagttcgaggctctcccgtccccgcgcgtgctagccacgcacctcccctactccctgctgcccggtagcatcaccggggatccggatagggagcgctcggggtgccggatcgtgtatgtctgccgggaacccaaggacgctctggtctctgcttggctgttcacgaggaaggcggcgtcggcggtggggtctgacgctcgatcgttcacgatccaggaggccttggagcttttctgtgatggtcgctgtgtgtgcggccggcagtgggagcacgtcctccagtactgggaggagagcgtgaggaggcctgacagggtgctgttccttcggtatgaggagatgctgattgatcccgaggcacacgtcaggaagctcgccaagttcatggggtgtggattttctgaggaggaggaggagcacggggtggtgagcgccatcgtggagctgtgtagcctgggcaagatgagggacatggaggtgaacagaaatggaagcaatatgttgggggtcaagaacgaaagctacttcaggaagggagttgctggggactggagcaaccatatgacgccggacatggcgcagaggctagacaaggtcgtagaggatgcattgcaagggactggattcagctttacgagcacagcatgatcgatgaggcagtgtgctcatagtacttgcgaactgcagaataatgcttgctggttgcagatcataccagccagccatggtgaccacccttcttttgtgatgaaggggaaattgatttgcgtataattcatctgtataactttgttacaaaccatagtttgtggcaccttggcgcgccaaaaccatatgcattactgtgtaaaaaaaaaaaaaaaa

SEQ ID NO: 602 - protein, 346 aa, Zea mays
  misc_feature: Ceres CLONE ID no.998865
  misc_feature: Bit score of 340.8 for HMM based on sequences of FIGURE 4.
  misc_feature (72)..(339): Pfam Name: Sulfotransfer_1 Pfam Description: Sulfotransferase domain
  misc_feature: Functional Homolog Of Ceres SEEDLINE ID no. ME02549 at SEQ ID NO. 590
MMASRQSGNNAQEAASPLASPPHSNIASIIPSLPLETRCPPFPLRRYANFWVPEVILKADHPGIHSCFKPRPTDVFVASFPKSGTTWLKALAFATLKRSMHPPLDGDHPLRRCNPHDCVRFLDANFNQQKDEFEALPSPRVLATHLPYSLLPGSITGDPDRERSGCRIVYVCREPKDALVSAWLFTRKAASAVGSDARSFTIQEALELFCDGRCVCGRQWEHVLQYWEESVRRPDRVLFLRYEEMLIDPEAHVRKLAKFMGCGFSEEEEEHGVVSAIVELCSLGKMRDMEVNRNGSNMLGVKNESYFRKGVAGDWSNHMTPDMAQRLDKVVEDALQGTGFSFTSTA

SEQ ID NO: 603 - protein, 338 aa, Oryza sativa subsp. indica
  misc_feature: Public GI ID no.125556140
  misc_feature: Bit score of 476.6 for HMM based on sequences of FIGURE 4.
  misc_feature (78)..(330): Pfam Name: Sulfotransfer_1 Pfam Description: Sulfotransferase domain
  misc_feature: Functional Homolog Of Ceres SEEDLINE ID no. ME02549 at SEQ ID NO. 590
MYSSSSMKPSSPSQANQDADDAKTYKELYQRCTDLVSSWPSRQGLSYLQLFRHEKGWYNGVTPLVGTMVADELFAARPSDIVVATLPKSGTTWIKALLYATVHRREHPADAAGDHPFNSLSPHECVKFLEYQLYRADEAPDLDALPDPRLFATHAPFDLLPRAVVAAAPPSGCKFVNEYKSRNGRELVAVDAAVGFFCDGVSPFGPYWEHVLGYWCAHRERPERVLFLRYEEMKRDPAGHVRRLAEFAGVPFTSPEEDGGAVDAIVRLCSFDNMVGLEATKGGRTQLTTTTVPNSAFFRRGEVGDWANHLSPEMAQRIDAITEAKFAGFGLAPSLIEL

SEQ ID NO: 604 - protein, 374 aa, Oryza sativa subsp. indica
  misc_feature: Public GI ID no.125534482
  misc_feature: Bit score of 323.3 for HMM based on sequences of FIGURE 4.
  misc_feature (63)..(363): Pfam Name: Sulfotransfer_1 Pfam Description: Sulfotransferase domain
  misc_feature: Functional Homolog Of Ceres SEEDLINE ID no. ME02549 at SEQ ID NO. 590
MAPTSSVHREGGSAAMDMAELIPTLPLETGSPPFPLRQYGGYWLPEWVLPGLEAVHTRFEPRPSDVFLASFPKSGTTWLKALAFATINRTTYPPSGDAHPLRHRGPHDCVKFFESTFAISGEGGGGDVDVFAALPSPRAVARPGTCSPPSRRRARLLATHIPYSLLPERITSAAADDGDSGCRIVYVCRDPKDAFVSMWLFTMSNMVKGVTTTSDEHHPAAAAPSIEQVFDLFCDGRSIAGPQWHHVREYWEASRRRPEKVLFLRYEEMLREPARNVERLAEFLRCPFTAGEVAAGVVDAIVDLCSIDRLRNVQANKTGVTDLAVKKESFFRRGVAGDWSNHMSPEMASRLDRVVEDALRGSGFTFAAAAGDSE

SEQ ID NO: 605 - protein, 356 aa, Oryza sativa subsp. indica
  misc_feature: Public GI ID no.125550135
  misc_feature: Bit score of 292.4 for HMM based on sequences of FIGURE 4.
  misc_feature (83)..(349): Pfam Name: Sulfotransfer_1 Pfam Description: Sulfotransferase domain
  misc_feature: Functional Homolog Of Ceres SEEDLINE ID no. ME02549 at SEQ ID NO. 590
MSSTTGAGQSAGPGPVPFKDIVVDDDAAAAGGVQVQQPVAEEYHDIIATLPCRPSMHEYQGTWILDDWLPGRMAFRRRFEARAGDVVLASLPKCGTTWLKALAFATAARDRYDPSSSGGGERRHPLRRLNPHECVPFVEVVYNAGEEAKLDAAPSPRIISTHAPYSLLPASITQSSTCKIIYISREPKDMLISLWHFINKRCKPNIIPFSDIWNSIYNDAYPESPIREHILGYWNMSKIQSDRVLFLKYEDVLRDPIKNVEKIAEFIGQPFSDAEKEAGIIESIVKLCSLENLKALATNSTGNYQRLMKEVPSESFFRKGVVGDWANYVTPDMAERMDKFLAEKFHGSGFSFTECL

SEQ ID NO: 606 - DNA, 1403 bp, Triticum aestivum
  misc_feature: Ceres CLONE ID no.639816
  misc_feature: Encodes the peptide sequence at SEQ ID NO 607
atcaattattgtatccaaacagatctagaagagaagctgatcttctccttccttcggcaccctctccttccctgatccacctactactccttctctcttcctcctagatcctgatcgggtacgttacagacgcgctggccatggcttcccctcgccatcgccaggacggagacggaccacacgacggcgcgccgacgtacgccggcatgscgaagctggtgccggcgctcccgctcgagacgcggtgccssccgttcgcgctgcggcgctacggcggcttctggctgccggaggcggccctgcggcgcggcctcccggcgttgcacgccgggttcgcgcccaggcgcgcagacgtgctcctcgccagctaccccaagtccggcaccacctggctcaaggccctcgccttcgccaccgtccgccgcgccgtgcacccgccttcttccatcgaccacccgctccgccgtcgcaacccgcaggactgcgtcccgttcctcgagttcgacttcgaccacggggacatggccgagctcgaggcgctcccttcccsscgggtgctcgccacgcacctcccctactcgctcctccccgaccgcgtcgtcgccgacgacggcgcgcggatcgtgtacgtctgccgggaccccaaggacgcgctggtctcctcgtggctcttcaccaggaaagcgtcgccgagtgtcggagtggactccgactcctactcgctgcaggaggcggccgagcttttccgcgagggccggtgcttctacggccctcagtgccggcacgtgctcgagtactgggacgcgagccgccgtcccttcggcggcggcgaggtgctgttcctgaggtacgaggagatgctgcgcgacccggcggggagtctgaagacgatggcggagttcatgggatgcggcttctccgaggaggaggtggcgcgaggggtggtggacgagatcgtggacctgtgcagcctggagaagctgaagaacatggaggccaacagggacgggcggcggaacgcgtcgggcatcaggagcgactctttcttccggaagggggtcgccggggactggagcagccacatgtcgccggagatggggaagatgctggacgaggccgtcgaggaggcactccaggggtctgggttcagcttctctggctgagctccggcgagcactggccagggcggtagtgcggggcaaacaacaatgtcattgcaaagcacggcttggaacacatgttttgtggcgatccatggatttaaggcgcgagtttgattccagtttcttgctcgaaagttgattgtcttgtaagttcaaacagtagtttgataactcattccaaatgtttctttcccaaagttccgaatcattccagttctacaatttcagtcctcattcagc

SEQ ID NO: 607 - protein, 340 aa, Triticum aestivum
  misc_feature: Ceres CLONE ID no.639816
  misc_feature: Bit score of 312.6 for HMM based on sequences of FIGURE 4.
  misc_feature (69)..(335): Pfam Name: Sulfotransfer_1 Pfam Description: Sulfotransferase domain
  misc_feature: Functional Homolog Of Ceres SEEDLINE ID no. ME02549 at SEQ ID NO. 590
MASPRHRQDGDGPHDGAPTYAGMAKLVPALPLETRCPPFALRRYGGFWLPEAALRRGLPALHAGFAPRRADVLLASYPKSGTTWLKALAFATVRRAVHPPSSIDHPLRRRNPQDCVPFLEFDFDHGDMAELEALPSPRVLATHLPYSLLPDRVVADDGARIVYVCRDPKDALVSSWLFTRKASPSVGVDSDSYSLQEAAELFREGRCFYGPQCRHVLEYWDASRRPFGGGEVLFLRYEEMLRDPAGSLKTMAEFMGCGFSEEEVARGVVDEIVDLCSLEKLKNMEANRDGRRNASGIRSDSFFRKGVAGDWSSHMSPEMGKMLDEAVEEALQGSGFSFSG

SEQ ID NO: 608 - protein, 349 aa, Oryza sativa subsp. indica
  misc_feature: Public GI ID no.125562170
  misc_feature: Bit score of 405.3 for HMM based on sequences of FIGURE 4.
  misc_feature (124)..(346): Pfam Name: Sulfotransfer_1 Pfam Description: Sulfotransferase domain
  misc_feature: Functional Homolog Of Ceres SEEDLINE ID no. ME02549 at SEQ ID NO. 590
MAQGQLDAESVVPTATGVRRRGRRFWLFRFRSCFLDRFRRRICLSLGCTANILASLPTREGWWTAFVLYHGCWMTQQAATSVSLPRWCTPSSRGAPTMCSSPPTQSAAPPGSRCSPSPSPTAAAAGDHPLLTQSPHDLVPFIEVPFHHLHPLAALDALPSPRLLSTHMPPQLLPRRVAELGCRIVYLCREPKDVVVSLWHYMNKGLRAVCRWLLPVRQYGPIWDHCLGYWKKSMEEPDMVLFLKYDDMMADPAGHVKKLAEFLRAPFTDEEVGAGVVEEVVRLCSFEKLSRLPVNSSGVVDRSSGRPMENSVFFRKGEVGDWKNYLTEEMAKKLDAVIEEKLKGSGLTF

SEQ ID NO: 609 - DNA, 1390 bp, Panicum virgatum
  misc_feature: Ceres CLONE ID no.1797059
  misc_feature: Encodes the peptide sequence at SEQ ID NO 610
ctcacagtgatctgaaacactcataaaaaaattcggtgaactagtcgcgtagcatggcaacgcatccaaagcagcaccaggagagcaaaggtgaggggatggcggccggcaagggcgacgagtccaccccgacaaacggcggcggcgtcctcccggccaacttcgccgaggtggtggcctcccttccccaagggccgcagtgctccatgtttccttccctccgccattaccgcggcttctggatcccggagatcagcctgctgagcctccccgaggtccacgcccgcttcgcgctgagccccacggatgtcctcgtcgcgagcttccccaagtgcggcaccacctggctcaagtccctttgcttcgccgccgcgcgccggtcctcccacccgccactcgacggcgggcacccgctcctccgccgcaacgcacacgactgcgtcaggtccatcgacacccttcggttcctgcaaggcggcggggacgacgacggcgaggcgccgcgcctcctcgggactcacctgccctactccctgctcccggcgcgcgccacggcggaggacggctccgggtgccggatcgtgtacgtcatccgggaccccaaggacacgctggtctccctctggcacttcaactccggcgtggtgctgacggcgccaggcggcggcgacgccaacggcgcgccgccgccaccggagaagaccaagttcgaggaggcgttcgagctcttctgccagggccactacgggctgggcccgcagtgggagcacgcccgcgagtactgggaggcgagcaggcggcgccccgtcagcgtgctgtgcctcaggtacgaggagatgctgcgggaccccgcgggcaacctgaggaagatcgcggcgttcatggggtgcccgttctcggaggcggaggaggaggccggcgtcgtgcgcgccatcctcgagctgtgcggcatggagaagcagcggagcctggcggtgaacaggagcggggcctacgtggtcaaggacctgctcaccatcggcaaccagcatttcttcaggaagggggtggcgggggactggaggaaccacatgacgccggagatggcggcgaggttggacggcatcgtcgaggaggcgctccagggttcaggattttcctttggcgacgcaagtagctaaggcaaatgcgtacgtggctctgaataatcatgccggccatttcggtttggcatcagcttggtgtgttggcctatgagtcgtttgttcagccgatgctgtttgtgtggcatctgtatgtgttgtttccgtttgtttccctttgttacgtgtctttgtgattttattacttcttctaataaattctcggcaaatctcttgccgtccttttccaaaaaaaaaaaaaaaaaaaa

SEQ ID NO: 610 - protein, 368 aa, Panicum virgatum
  misc_feature: Ceres CLONE ID no.1797059
  misc_feature: Bit score of 255.4 for HMM based on sequences of FIGURE 4.
  misc_feature (83)..(360): Pfam Name: Sulfotransfer_1 Pfam Description: Sulfotransferase domain
  misc_feature: Functional Homolog Of Ceres SEEDLINE ID no. ME02549 at SEQ ID NO. 590
MATHPKQHQESKGEGMAAGKGDESTPTNGGGVLPANFAEVVASLPQGPQCSMFPSLRHYRGFWIPEISLLSLPEVHARFALSPTDVLVASFPKCGTTWLKSLCFAAARRSSHPPLDGGHPLLRRNAHDCVRSIDTLRFLQGGGDDDGEAPRLLGTHLPYSLLPARATAEDGSGCRIVYVIRDPKDTLVSLWHFNSGVVLTAPGGGDANGAPPPPEKTKFEEAFELFCQGHYGLGPQWEHAREYWEASRRRPVSVLCLRYEEMLRDPAGNLRKIAAFMGCPFSEAEEEAGVVRAILELCGMEKQRSLAVNRSGAYVVKDLLTIGNQHFFRKGVAGDWRNHMTPEMAARLDGIVEEALQGSGFSFGDASS

SEQ ID NO: 611 - DNA, 1262 bp, Triticum aestivum
  misc_feature: Ceres CLONE ID no.1031510
  misc_feature: Encodes the peptide sequence at SEQ ID NO 612
aagatctcagtgccatggattctgctcatgacgacggctttgcgtcggagatggcggagctgccgctggagacgcggtgcccgccgttcgcgctgcgccagtactccggcttctggctgccggaggcggtgctggcgcgcggtctcccggcggcgcatgaccggttcgcgccgaggccgaacgacgtgctcctcgccagcttccccaagtccggcaccacgtggctcaaggcgctcgccttcgccaccgtgcaccgggacacgcacccaccgtccgctgacgaccacccgctccgccgcctcagcccgcacggttgcgttccgttcctcgagatcagcctcgcgttcgccgacgacgtgggcgccgtggcggccgagctgggggcgctcccttccccgcgcgtgctcgccacgcacctgcccttctccctcctccctggacgcctcgccgccgccggccgggtcgtgtacatctgccgggaccccaaggacgcgctcgtctcctcgtgcttcttcaccaggaaggtgtcgaagcacctgggcgtcgacgcggagtccttctcgctccgggaggccgtggagctcttcagcgcggggcgctgcctcgtcggcccgcagtggcggcacgtcgttgagtactgggaggccagcctcagccgtcggaacgtgttgttcctcaggtatgaggagatgctccgcgaccccgtggggaacctcaggacgatggcagagttcatggggtgcgccttctcgccgggggaggaggagcgaggcgtgccgcaggccatcgtggagctgtgcagcctggagaagctcaagaatgtggaggcgagtcggggcggcggaaggacggtagatggcatcaaggccgacgcctacttcaggaagggggtggccggggattggagcagccacatgacgccggagatggggaagatggtggacgaggctgtggaggacgggctccggggatctggttttagcttcgccgactcaactccggccaaccctgaaaaatgacagagtcgaagcgaacccagatcgtccccggcaccacctacttcttggttcaataatgcatgctttgtgtccttgtttttgagtccggtgtgtgtgcgcgcgcgcgatgcatattgtccacgtactgtccattcatgtatgcgtacttttctttggcttccagaactcaactcaactgagctgaaatatgtgtgtgcttttagcattgaactgaaccgatatgctacaaaaaaaaaaaaaaaa

SEQ ID NO: 612 - protein, 334 aa, Triticum aestivum
  misc_feature: Ceres CLONE ID no.1031510
  misc_feature: Bit score of 277.5 for HMM based on sequences of FIGURE 4.
  misc_feature (55)..(321): Pfam Name: Sulfotransfer_1 Pfam Description: Sulfotransferase domain
  misc_feature: Functional Homolog Of Ceres SEEDLINE ID no. ME02549 at SEQ ID NO. 590
MDSAHDDGFASEMAELPLETRCPPFALRQYSGFWLPEAVLARGLPAAHDRFAPRPNDVLLASFPKSGTTWLKALAFATVHRDTHPPSADDHPLRRLSPHGCVPFLEISLAFADDVGAVAAELGALPSPRVLATHLPFSLLPGRLAAAGRVVYICRDPKDALVSSCFFTRKVSKHLGVDAESFSLREAVELFSAGRCLVGPQWRHVVEYWEASLSRRNVLFLRYEEMLRDPVGNLRTMAEFMGCAFSPGEEERGVPQAIVELCSLEKLKNVEASRGGGRTVDGIKADAYFRKGVAGDWSSHMTPEMGKMVDEAVEDGLRGSGFSFADSTPANPEK

SEQ ID NO: 613 - DNA, 1075 bp, Gossypium hirsutum
  misc_feature: Ceres CLONE ID no.1973081
  misc_feature: Encodes the peptide sequence at SEQ ID NO 614
cttttgaagagatgatatctactctgcctaaagagaattgttggggttattccgaagatcaatatcaatatcaaggtttttggttcaccccgcgttttctacgaggagcgttgtcggctcaacaacaattccaggctcaaccaactgatatcatcctttgcagctctccaagaacaggcacagcctggttaaaatccctcactttcgccactattacaagaacttcatacaatgattccaccacccctttactttccaagatgccccatgatgttgtgcctttcatggagttcgatcatgcccagttttccactaatcgacatcttggaattcctcttttagccactcatcttccttattctttcttacccagatctataattgattctggttgtaaacttatttacatttgcagggaccccaaagatacatttgtttcattgtatcatttcattgcacggtactacaaatcccaaaatactcaacccattcaacttgatgaagcgttcgaattgttctatgaaggtgtaagtctgtatgggccttattgggaccatgttttggggtactggaaagcaagtttggaacgtccggacaagttaatgttcttgaaatacgaagatttggttgaagatactgttttgtatcttaagaaaacagcagagtttatgggttatcctttctcgtcagaggaacaacaataaggggtgcctgaaaacattgtgaagatgtgcagtttcgacaatttaagtggcttggaagtaaataaaaccgggagacatcgtgaaacggaaaatagcattttcttccggaacgggaaggttggagactggaagaattatttgaccactaaaatggctcaacgtttagaccaacgaacaatgcaaaagttgagcggttcaggtttaagtctctaattgaagatctataatctatgtatcatccattgttgacttaaaacatgattagggctcggtattatttcttttaataatattaccttcaaataagatcatcttggttgacatttgtaattatccattatcttatttcttaaaaaaaaaaaaaaaaaaaa

SEQ ID NO: 614 - protein, 230 aa, Gossypium hirsutum
  misc_feature: Ceres CLONE ID no.1973081
  misc_feature: Bit score of 128.2 for HMM based on sequences of FIGURE 4.
  misc_feature (44)..(228): Pfam Name: Sulfotransfer_1 Pfam Description: Sulfotransferase domain
  misc_feature: Functional Homolog Of Ceres SEEDLINE ID no. ME02549 at SEQ ID NO. 590
MISTLPKENCWGYSEDQYQYQGFWFTPRFLRGALSAQQQFQAQPTDIILCSSPRTGTAWLKSLTFATITRTSYNDSTTPLLSKMPHDVVPFMEFDHAQFSTNRHLGIPLLATHLPYSFLPRSIIDSGCKLIYICRDPKDTFVSLYHFIARYYKSQNTQPIQLDEAFELFYEGVSLYGPYWDHVLGYWKASLERPDKLMFLKYEDLVEDTVLYLKKTAEFMGYPFSSEEQQ

SEQ ID NO: 615 - protein, 335 aa, Oryza sativa subsp. indica
  misc_feature: Public GI ID no.125561002
  misc_feature: Bit score of 247.4 for HMM based on sequences of FIGURE 4.
  misc_feature (81)..(332): Pfam Name: Sulfotransfer_1 Pfam Description: Sulfotransferase domain
  misc_feature: Functional Homolog Of Ceres SEEDLINE ID no. ME02549 at SEQ ID NO. 590
MSTTAKLAGLLRDEQGPVAFNDAVDEDAVPVEPLTEHDDAIFAMPAAHCDNMQFRCYRGFWISEMWAPGVVAVHRSFAPRADDVIVASLQKSGTTWLKALTLATMARGAWPPSSHDHPLRRLNPHLCVPSLEVLYTQGRDALLDMLPSPRLLSTHMPLSLLPPSTCKIVYICRDQKETAVSLWHFMKRRHPDLTFSEVHEAFCNGICMGGPAWDNILEFWYASNAEPTRVLFLTYEKVLQDPCDAVKKLAQFLGQPFSGAEEEAGVVTEITDLCSIDNLRNQKANKYGFIGGKISHESFFRKGMAGDWTNHMTLEMAERLDSILREKLDGSGLIV

SEQ ID NO: 616 - protein, 376 aa, Oryza sativa subsp. indica
  misc_feature: Public GI ID no.125541732
  misc_feature: Bit score of 206.0 for HMM based on sequences of FIGURE 4.
  misc_feature (80)..(373): Pfam Name: Sulfotransfer_1 Pfam Description: Sulfotransferase domain
  misc_feature: Functional Homolog Of Ceres SEEDLINE ID no. ME02549 at SEQ ID NO. 590
MAGPVPFVDVVVDNAGGAVANKADPGVVLPQEEEYESFLSSLPSNPKLQLLRYQGKWLLQSWVPGIIAIQRGGFAPRRGGGDVVLASLPKCGTTWLKALAFATMARRAHPPAGDEQHPLLRLNPHDCVPSMEKLFAAGLGSKIMDALPSPRLMATHVHHSLLPASITDNPHCKIIYICSPTLLFFLPLKIESWWKWLTCEFSSPTSLKVSLWHFVRRRLPEIPFLELFESACEGRCLSSPIWDHILGYWNASKTRPETVLFLRYEELLHDPADSVRKLARFVGQPFSPEEEEAGDVEDIVRLCSFEQMKNLEVNRAAGLSPALQQNAYTNGSFFRKGGTGDWANHMTPEMAERAARRHRRREAPLIRPLFLMISAC

SEQ ID NO: 617 - protein, 422 aa, Oryza sativa subsp. indica
  misc_feature: Public GI ID no.125560677
  misc_feature: Bit score of 171.0 for HMM based on sequences of FIGURE 4.
  misc_feature (102)..(419): Pfam Name: Sulfotransfer_1 Pfam Description: Sulfotransferase domain
  misc_feature: Functional Homolog Of Ceres SEEDLINE ID no. ME02549 at SEQ ID NO. 590
MGSTGEVMLASGGGAAPAPATSRDGRGAAAGLGPVAFKDAADADAIPVRPPTEHDAAVSAMPARVFHNLKLRQHQGYWVLDAWARGAVAMQRGGGGLVPRADGDVLLASLPKSGTTWLKALAFAVMARAAHPPASPDHPLRRLNPHDCVPLVDRLFAAGRDAVLDELPSPRLMCTHMPLSLLPATVADGSSGCKIIYICRRMDPDDDVQGGDVQARQGVQRHGTLRCSSPCSPSTAAAPAYTTARTGYSWMALRRGRSHSSPDQKDALVSMWHFLKRNGLQNLYESFCEGTCFGGPVWNHILEYWRASKANPSRVLFLRYERLLQDPTDSIRELAEFVGQPFTSSEEEAGVVTEIVELCSMENLMSQKANKEGAQGVFIKFSHDSYFRKGVAGGWTSHMTPEMGRRLDAILRDKFDGSGLTI

SEQ ID NO: 618 - protein, 456 aa, Oryza sativa subsp. indica
  misc_feature: Public GI ID no.125559115
  misc_feature: Bit score of 176.2 for HMM based on sequences of FIGURE 4.
  misc_feature (75)..(451): Pfam Name: Sulfotransfer_1 Pfam Description: Sulfotransferase domain
  misc_feature: Functional Homolog Of Ceres SEEDLINE ID no. ME02549 at SEQ ID NO. 590
MQPTSAAAGPVPFKDIAAVAVARRPVAEEYGDVVAALPSRLYPPQQRWREYQGAWFREAWVPGIVALQRRFEPRAGDVLLASLPKCGTTWLKALAFATAARGVYPPAAAGGDGRHPLLRLNPHECVPFLEGIYLDGEEAKLDAAPTPRLMSTHASYPNLPASITEDDRCKIIYICRGTKEKLLGGLVPTAGKWRRYCGAGRGPHRRLRAEALFWGRRPQHPLAPDASGGGGYAPAAPRDGGVGGAVPSGEGGVAAAQTAVLRPTMATAKTMRGDREQPKDMAISLWHFMNCSKAKTSSLSDDQWESITMSLSDVWESIREGAYLGGPIWEHILGYWNTSKAKPDKVLFLKYEEVLHDPTKNIEKIAEFIGQPFSDAEKEAGIVESIIELCSFEKMKASGANSTGSLHMMANEYPHESFFRKGVIGDWVNHVTPEMADSLDKFLSAKFYGSGFTFAE

SEQ ID NO: 619 - protein, 359 aa, Arabidopsis thaliana
  misc_feature: Public GI ID no.15809903
  misc_feature: Bit score of 930.4 for HMM based on sequences of FIGURE 4.
  misc_feature (91)..(353): Pfam Name: Sulfotransfer_1 Pfam Description: Sulfotransferase domain
  misc_feature: Functional Homolog Of Ceres SEEDLINE ID no. ME02549 at SEQ ID NO. 590
MATSSMKSIPMAIPSFSMCHKLELLKEGKTRDVPKAEEDEGLSCEFQEMLDSLPKERGWRTRYLYLFQGFWCQAKEIQAIMSFQKHFQSLENDVVLATIPKSGTTWLKALTFTILNRHRFDPVASSTNHPLFTSNPHDLVPFFEYKLYANGDVPDLSGLASPRTFATHLPFGSLKETIEKPGVKVVYLCRNPFDTFISSWHYTNNIKSESVSPVLLDQAFDLYCRGVIGFAPFWEHMLGYWRESLKRPEKVFFLRYEDLKDDIETNLKRLATFLELPFTEEEERKGVVKAIAELCSFENLKKLEVNKSNKSIKNFENRFLFRKGEVSDWVNYLSPSQVERLSALVDDKLGGSGLTFRLS

SEQ ID NO: 620 - protein, 347 aa, Arabidopsis thaliana
  misc_feature: Public GI ID no.30681703
  misc_feature: Bit score of 787.4 for HMM based on sequences of FIGURE 4.
  misc_feature (77)..(341): Pfam Name: Sulfotransfer_1 Pfam Description: Sulfotransferase domain
  misc_feature: Functional Homolog Of Ceres SEEDLINE ID no. ME02549 at SEQ ID NO. 590
MAIPSFSMCHKPELLKEGKSEGQEEEGLSYEFQEMLDSLPKERGRRNRYLYLFQGFRCQAKEIQAITSFQKHFQSLPDDVVLATIPKSGTTWLKALTFTILTRHRFDPVSSSSSDHPLLTSNPHDLVPFFEYKLYANGNVPDLSGLASPRTFATHVPFGALKDSVENPSVKVVYLCRNPFDTFISMWHYINNITSESVSAVLLDEAFDLYCRGLLIGFGPFWEHMLGYWRESLKRPEKVLFLKYEDLKEDIETNLKKLASFLGLPFTEEEEQKGVVKAIADLCSFENLKKLEVNKSSKLIQNYENRFLFRKGEVSDLVNYLSPSQVERLSALVDDKLAGSGLTFRLS

SEQ ID NO: 621 - protein, 340 aa, Arabidopsis thaliana
  misc_feature: Public GI ID no.9759556
  misc_feature: Bit score of 767.5 for HMM based on sequences of FIGURE 4.
  misc_feature (70)..(334): Pfam Name: Sulfotransfer_1 Pfam Description: Sulfotransferase domain
  misc_feature: Functional Homolog Of Ceres SEEDLINE ID no. ME02549 at SEQ ID NO. 590
MCHKPELLKEGKSEGQEEEGLSYEFQEMLDSLPKERGRRNRYLYLFQGFRCQAKEIQAITSFQKHFQSLPDDVVLATIPKSGTTWLKALTFTILTRHRFDPVSSSSSDHPLLTSNPHDLVPFFEYKLYANGNVPDLSGLASPRTFATHVPFGALKDSVENPSVKVVYLCRNPFDTFISMWHYINNITSESVSAVLLDEAFDLYCRGLLIGFGPFWEHMLGYWRESLKRPEKVLFLKYEDLKEDIETNLKKLASFLGLPFTEEEEQKGVVKAIADLCSFENLKKLEVNKSSKLIQNYENRFLFRKGEVSDLVNYLSPSQVERLSALVDDKLAGSGLTFRLS

SEQ ID NO: 622 - DNA, 1233 bp, Populus balsamifera subsp. trichocarpa
  misc_feature: Ceres ANNOT ID no.1501305
  misc_feature: Encodes the peptide sequence at SEQ ID NO 623
atgcctgcctctactacaacttccatggttctcaaccatttcacaaagaatcaagcaaatgacaatggagaggatttagagagattaaccaatgagtgcaaggaattgctgctttcactcccaagagagaagggttggagaactgcatgcctctataaatacaaagggttttggtgccaaccaaaagaaatccaagcgataatctcttttcaaaaacactttgaaccaagagacactgatgttatcctagcatcaatacctaaatcaggaactacctggctcaaagccctatcttttgccatcttgaatcgcaagaaatttgcaatctctagtaatgaccaccctttgctcgtctctaatcctcacgatcttgcacctttctttgagtacaagctttatgcagacaagcaagttcctgacctctcgaaactccctgatcctagactttttgccacccacattccatttgcttcacttcaagactccatcaagaagtctaattgccggattatttatatctgtagaaacccttttgacacttttatttcctcatggactttcagcaacaagctgagatcagaaactgttcctccactgttactagaggaaaccttcaaaatgtattgcgaaggggttgtagggttcggtcccttctgggaccatatgttgggatactggaaggaaagcttggagagacaagacaaggtgttgttcttgaagtatgaggacatgaaagcagatgttacgttttacttgaagaagattgccaaatttcttggctgccctttttcaatggaagaagaaaaggaaggtgtagtggaaaagatagccagcctttgtagctttgagaagatgaagaatttagaagttaacaaatctggaaggtctattacgaacttcgaaaataagcacttgtttaggaaagctgaagtcggagattgggtgaattatctgtctccttcaatggtgaagcaattatctcaattaatagaggaaaagttgggtggatctggtattgaattcaaagtgtttccttatactagcactactccgtctacatctccaaggcttttcgctgctcacattccctattcatcattgcccgaatccatcaagaagtctaattgtcgtgaagtttacatttatcgtaacccttttaacgtggtggcatcctggtttcatttttccaatgttgaaggtgaaccagagaagctggatgaggagtatttttga

SEQ ID NO: 623 - protein, 410 aa, Populus balsamifera subsp. trichocarpa
  misc_feature: Ceres ANNOT ID no.1501305
  misc_feature: Bit score of 1150.8 for HMM based on sequences of FIGURE 4.
  misc_feature (78)..(338): Pfam Name: Sulfotransfer_1 Pfam Description: Sulfotransferase domain
  misc_feature: Functional Homolog Of Ceres SEEDLINE ID no. ME02549 at SEQ ID NO. 590
MPASTTTSMVLNHFTKNQANDNGEDLERLTNECKELLLSLPREKGWRTACLYKYKGFWCQPKEIQAIISFQKHFEPRDTDVILASIPKSGTTWLKALSFAILNRKKFAISSNDHPLLVSNPHDLAPFFEYKLYADKQVPDLSKLPDPRLFATHIPFASLQDSIKKSNCRIIYICRNPFDTFISSWTFSNKLRSETVPPLLLEETFKMYCEGVVGFGPFWDHMLGYWKESLERQDKVLFLKYEDMKADVTFYLKKIAKFLGCPFSMEEEKEGVVEKIASLCSFEKMKNLEVNKSGRSITNFENKHLFRKAEVGDWVNYLSPSMVKQLSQLIEEKLGGSGIEFKVFPYTSTTPSTSPRLFAAHIPYSSLPESIKKSNCREVYIYRNPFNVVASWFHFSNVEGEPEKLDEEYF

SEQ ID NO: 624 - DNA, 1119 bp, Populus balsamifera subsp. trichocarpa
  misc_feature: Ceres ANNOT ID no.1448303
  misc_feature: Encodes the peptide sequence at SEQ ID NO 625
atgcctgcctctactacaacttccatggttctcaaccatttcacaaagaatcaagcaaatgacaatggagaggatttagagagattaaccaatgagtgcaaggaattgctgctttcactcccaagagagaagggttggagaactgcatgcctctataaatacaaagggttttggtgccaaccaaaagaaatccaagcgataatctcttttcaaaaacactttgaaccaagagacactgatgttatcctagcatcaatacctaaatcaggaactacctggctcaaagccctatcttttgccatcttgaatcgcaagaaatttgcaatctctagtaatgaccaccctttgctcgtctctaatcctcacgatcttgcacctttctttgagtacaagctttatgcagacaagcaagttcctgacctctcgaaactccctgatcctagactttttgccacccacattccatttgcttcacttcaagactccatcaagaagtctaattgccggattatttatatctgtagaaacccttttgacacttttatttcctcatggactttcagcaacaagctgagatcagaaactgttcctccactgttactagaggaaaccttcaaaatgtattgcgaaggggttgtagggttcggtcccttctgggaccatatgttgggatactggaaggaaagcttggagagacaagacaaggtgttgttcttgaagtatgaggacatgaaagcagatgttacgttttacttgaagaagattgccaaatttcttggctgccctttttcaatggaagaagaaaaggaaggtgtagtggaaaagatagccagcctttgtagctttgagaagatgaagaatttagaagttaacaaatctggaaggtctattacgaacttcgaaaataagcacttgtttaggaaagctgaagtcggagattgggtgaattatctgtctccttcaatggtgaagcaattatctcaattaatagaggaaaagttgggtggatctggaggtgtccaagctgctgctgctgctgcttcttcttcttcttctgttataaagaagaaattcgagctacagagatatggagagaataagaatacaaatgtcaattga

SEQ ID NO: 625 - protein, 364 aa, Populus balsamifera subsp. trichocarpa
  misc_feature: Ceres ANNOT ID no.1448303
  misc_feature: Bit score of 886.1 for HMM based on sequences of FIGURE 4.
  misc_feature (70)..(330): Pfam Name: Sulfotransfer_1 Pfam Description: Sulfotransferase domain
  misc_feature: Functional Homolog Of Ceres SEEDLINE ID no. ME02549 at SEQ ID NO. 590
MVLNHFTKNQANDNGEDLERLTNECKELLLSLPREKGWRTACLYKYKGFWCQPKEIQAIISFQKHFEPRDTDVILASIPKSGTTWLKALSFAILNRKKFAISSNDHPLLVSNPHDLAPFFEYKLYADKQVPDLSKLPDPRLFATHIPFASLQDSIKKSNCRIIYICRNPFDTFISSWTFSNKLRSETVPPLLLEETFKMYCEGVVGFGPFWDHMLGYWKESLERQDKVLFLKYEDMKADVTFYLKKIAKFLGCPFSMEEEKEGVVEKIASLCSFEKMKNLEVNKSGRSITNFENKHLFRKAEVGDWVNYLSPSMVKQLSQLIEEKLGGSGGVQAAAAAASSSSSVIKKKFELQRYGENKNTNVN

SEQ ID NO: 626 - DNA, 1379 bp, Glycine max
  misc_feature: Ceres CLONE ID no.607280
  misc_feature: Encodes the peptide sequence at SEQ ID NO 627
gatgatgatttcttttaatttttcacaatgaaataatttgtgcgctcgaaacagaaagaaagctttgagtcgtccatcgctttcatccagtgtttgatctgtcggtagcatgattccttactagagatcgaccattagcactctaatggctccaacaaatgtcacatgcttcagagaagaaaatgaatccgagaaaggggaggaaataacaatagaagaagacaagctaagtcaagaatgtaaggagttgatactctctcttcctagggaaagaggttggagaacacgttatatatatctatttcaaggattttggtgccagccattggaaatccaagcaataatcacttttcagaagcacttccaagctaaagacagtgatgttattgtggccacaattccaaaatcaggtaccacttggctgaaagctctcacctttgccattgtcaatcgccatactcatagtatcactacatcaatgtcatcacatcctttgcttacttctaatcctcatgaacttgtgcctttcatagaatacaccgtttatggtaatgcccctagccatgttccaaacctatccaacatgactgagccaagactttttggtacacatattccattccatgcattggccaagtccatcaaggagtccaatagtagaataatttatatatgtaggaacccacttgacacttttgtgtctacttggattttcctcaacaaaattaagccagaacatttacctgaatttgaactaggggaagcttttgaaaagtattgcaaaggaataatagggtttggtccaacttgggaccaaatgttgggttattggaaggagagtatagctaggcctagtaaggttttgttcttgaagtacgaggatcttaaaaaagatgtcaattttcatgtgaaaagaatagcggagttcttaggatgtcctttcacttcggaggaagaaggtgatgggactattgagagcataatcaagctatgcagcttcgagaagatgaaggaattggaggcaaataaatctggaacatttgctaggaactttgagagaaagtacttgttccgaaaggctgaaatgggagattgggtgaactacctttcccctgaaatgggtgaaaagttatcgcaaattatggaagaaaagttaagtgggtcaggcttgtcattttaagtgtctccttatttttgttgatcgatcactagctagtgatcatcatctacatcaagtgtctaaataagaatcgtgcatatatgcaggtcatgatgtggcctacaagtgcatgttcgttgtgattttcccttttcccttttcccgtttggatgatttttcctactagtgcattgaaggtctcagtaaagttatttctatc

SEQ ID NO: 627 - protein, 344 aa, Glycine max
  misc_feature: Ceres CLONE ID no.607280
  misc_feature: Bit score of 922.5 for HMM based on sequences of FIGURE 4.
  misc_feature (77)..(341): Pfam Name: Sulfotransfer_1 Pfam Description: Sulfotransferase domain
  misc_feature: Functional Homolog Of Ceres SEEDLINE ID no. ME02549 at SEQ ID NO. 590
MAPTNVTCFREENESEKGEEITIEEDKLSQECKELILSLPRERGWRTRYIYLFQGFWCQPLEIQAIITFQKHFQAKDSDVIVATIPKSGTTWLKALTFAIVNRHTHSITTSMSSHPLLTSNPHELVPFIEYTVYGNAPSHVPNLSNMTEPRLFGTHIPFHALAKSIKESNSRIIYICRNPLDTFVSTWIFLNKIKPEHLPEFELGEAFEKYCKGIIGFGPTWDQMLGYWKESIARPSKVLFLKYEDLKKDVNFHVKRIAEFLGCPFTSEEEGDGTIESIIKLCSFEKMKELEANKSGTFARNFERKYLFRKAEMGDWVNYLSPEMGEKLSQIMEEKLSGSGLSF

SEQ ID NO: 628 - DNA, 1014 bp, Populus balsamifera subsp. trichocarpa
  misc_feature: Ceres ANNOT ID no.1448305
  misc_feature: Encodes the peptide sequence at SEQ ID NO 629
atggaagacattcaaattactcaaagaaacagtactgtttcagaaaccggagagagtgatcaatgccgtgatttactatcatcacttcccaaagagaaagactggatatcttgttatatgtatcttttccaaggcttttggtgccctccgaaggagattcatgctgtagtttcattccaaaataactttcaatcatgcaacactgacactatacttgtctccatgcctaaatcaggtacgacatggttgaaagccttggtattttccatcatgaaccgtgaaaaatatcaaaccgcagaaagccccttgaattctttcaaccctcatgatctcgtgcctttctttgagtataggctttatgcaaacaaccaagttcctgacctgtctgcatttccatcgcctagaatattttcaacccatgtgccatatccatcactgccagaatctatcaggaactctacttgtcgggttgtttatatatgtagaaatcccttggacaactttatctccttctggcatttcctctcaaaagcaagacctgagagacttggaccacttcttttggaggaggcttttgatagtttttgcaatggagttgtagggtttggtcccttttttgatcatgttctagggtattggaaggagagcttggagagaccagagaaggtattgtttcttaagtttgaggacttaaaagaagatatcaattctcagatgaaaagtctggctgtgttcttgggttgccccttttctttggaggaagagagggatggggttatagaggacatatccaagctgtgcagcctcgatagtctgaaggatatcgaggcaaacaagagaggtaagtctatcccatacttcgagaataatactttatttagaagaggtgaggttggggactggatcaattatcttactcctgagatggttgatcgtttaaacaagatcacagcacaaaagttggctggttctggattagagttcaagattactagtctagacaacaatgtttga

SEQ ID NO: 629 - protein, 337 aa, Populus balsamifera subsp. trichocarpa
  misc_feature: Ceres ANNOT ID no.1448305
  misc_feature: Bit score of 620.2 for HMM based on sequences of FIGURE 4.
  misc_feature (67)..(325): Pfam Name: Sulfotransfer_1 Pfam Description: Sulfotransferase domain
  misc_feature: Functional Homolog Of Ceres SEEDLINE ID no. ME02549 at SEQ ID NO. 590
MEDIQITQRNSTVSETGESDQCRDLLSSLPKEKDWISCYMYLFQGFWCPPKEIHAVVSFQNNFQSCNTDTILVSMPKSGTTWLKALVFSIMNREKYQTAESPLNSFNPHDLVPFFEYRLYANNQVPDLSAFPSPRIFSTHVPYPSLPESIRNSTCRVVYICRNPLDNFISFWHFLSKARPERLGPLLLEEAFDSFCNGVVGFGPFFDHVLGYWKESLERPEKVLFLKFEDLKEDINSQMKSLAVFLGCPFSLEEERDGVIEDISKLCSLDSLKDIEANKRGKSIPYFENNTLFRRGEVGDWINYLTPEMVDRLNKITAQKLAGSGLEFKITSLDNNV

SEQ ID NO: 630 - DNA, 993 bp, Populus balsamifera subsp. trichocarpa
  misc_feature: Ceres ANNOT ID no.1448307
  misc_feature: Encodes the peptide sequence at SEQ ID NO 631
atggaagacacccaaatgatcaccggaaacaacaatagtcttgcagaaaccgatgagattgctgacctcctgtcatcccttcccaaagaaaagtcatggcgattaggttatctgtatcgataccaaggcttttggtgtcctgaaaagcagattcctgctgtcattgcatttcaaaagcacttcatagcacagaaaacagatactatactagtcaccatgcctaaatcaggcacaacatggttgaaagccttggcattttccattatgaatcgtgcaaaatatacaccctcgtgtagccctttgaactctgtcaaccctcatgatcttgtgcctttctttgagtttgggctttacgcaaataaccaacttcctgacctgtctacctttccatcccctagaatgtttgctactcatgtgccatatccatcaataccggattccatcaagaactccggctgtcgaattgtttgtctttgcaggaatccatttgacaactttatctccttgtggcatttcgcctccaaagcaagacatgaaagtcttgggccattatctatggaggattgtttcgatagtttttgcaatggacttggaggattcggtcccttttttgaccacgtattagggtattggagagaaagcttagagagaccagaggaggttctgtttctcacgtatgaggacatgaaagaagacattaattctcagatgaaaaggttagctgagttcctgggctgtcctttttccttggaagaagaggcagatggggttgtggaaggaatatcaaagttgtgtagcttcagcaatatgaaggacaaagagatcaacaagactggtaagtctatcccacactttgagaacaagactctctttagaagaggtgaagtaggggattgggtcaattacctttctcctgagatggtggatcgtttgaacaaaatcatggaacaaaagctggctggttctggtttgaagttcaagactggtttgtag

SEQ ID NO: 631 - protein, 325 aa, Populus balsamifera subsp. trichocarpa
  misc_feature: Ceres ANNOT ID no.1448307
  misc_feature: Bit score of 591.9 for HMM based on sequences of FIGURE 4.
  misc_feature (60)..(318): Pfam Name: Sulfotransfer_1 Pfam Description: Sulfotransferase domain
  misc_feature: Functional Homolog Of Ceres SEEDLINE ID no. ME02549 at SEQ ID NO. 590
MITGNNNSLAETDEIADLLSSLPKEKSWRLGYLYRYQGFWCPEKQIPAVIAFQKHFIAQKTDTILVTMPKSGTTWLKALAFSIMNRAKYTPSCSPLNSVNPHDLVPFFEFGLYANNQLPDLSTFPSPRMFATHVPYPSIPDSIKNSGCRIVCLCRNPFDNFISLWHFASKARHESLGPLSMEDCFDSFCNGLGGFGPFFDHVLGYWRESLERPEEVLFLTYEDMKEDINSQMKRLAEFLGCPFSLEEEADGVVEGISKLCSFSNMKDKEINKTGKSIPHFENKTLFRRGEVGDWVNYLSPEMVDRLNKIMEQKLAGSGLKFKTGL

SEQ ID NO: 632 - protein, 348 aa, Medicago truncatula
  misc_feature: Public GI ID no.92887174
  misc_feature: Bit score of 902.6 for HMM based on sequences of FIGURE 4.
  misc_feature (76)..(341): Pfam Name: Sulfotransfer_1 Pfam Description: Sulfotransferase domain
  misc_feature: Functional Homolog Of Ceres SEEDLINE ID no. ME02549 at SEQ ID NO. 590
MASTDLTNMKEDQSRDGQETTSKVNKVSHDYNNLILSLPRENGCETQYMYFFHGFWCPSTLIQSVNSFQNNFHAKDSDIVVASIPKSGTTWLKGLAYAIVNRQHFTSLENNHPLLLFNPHELVPQFEVNLYGDKDGPLPQIDVSNMTEPRLFGTHMPFPSLPKSVKESNCKIIYICRNPFDTFVSYWIFINKIRLRKSLTELTLEESFERYCKGICLFGPFWDNMLGYLKESIERPDRVLFLKYEDLKEDVNFHTKRIAEFVGIPFTQEEENNGVIENIIKLCSFESMKEIEGNQSGTISGDIEKEFYFRKGEIGDWANYLSSSMVEKLSKVMEEKLNGSSLSFKVCA

SEQ ID NO: 633 - DNA, 1243 bp, Gossypium hirsutum
  misc_feature: Ceres CLONE ID no.1857162
  misc_feature: Encodes the peptide sequence at SEQ ID NO 634
agttttgggtggtgctagtttcacaagaaatctccaaagctagaatggtttcaaaatcacatgatgtgtactcctcttgggatgatgaattcaaaaaactggtgcaaagcttccccaaagagaaaggctgggcaggatccaatctttatttctatcaaggtttttggtgcccctctcttgttctaaaagcttttatttctttccagaaacattttcaagcatttaattctgatatcatcgttgctacttttccaaaatgtggtactacttggctcaaggccttgactttctccactttgtaccgcaatcagttcccatgggatgaaaatccattgctcacctttggccctcaccaacttgttcgtttcttcgagtatgatctttacttgaacaacccttttcctgatcttcgaaatgtttgtgcttatcagccaaggcttttttccacccacgccccttatgctactttgccaacttccattaaggattctggctgtaagattgtttacatatgtagaaaccccatggatatgttcatttctctttggcttttctctgccaagctccgagacaaaaaccaagagtcactatcactagatgaagcttttgacaagttctaccatggaatctctgcgcatggaccattttttgatcatgtattgggatattggaaggcaagccaagaaaaccccaacaaaatattgtttttgaactttgaagatcttaaggaagatatggattcccatttgaaaattttggccatgttcttaggagttcctttcacagatgatgaagagaaacaaggagttgttgaaaaaatagcgaaaatttgtagctttgagaacttgaaagaattggaagtgaacatgaaggacgtacatacttctggagttccacacacacatttttttaggaaaggagaagtgggagattggagcaattatctcacacccttcatgattgaatgtttggagaagcttattcaagagaaattgaatggctcgggtttaacatttaaactgctctccgaaactgcaaacaatattgcttctccatgatcgcggggatgtcttctagcttttttgggaatgaaatctcttttattcccattttctttataaataatctgtactagagttctcttgtaatcatgatcagaataaattgctttgaggtatgttttgtggattttatgtgaaaataaatgaagttgcattaaacataaaaaaaaaaaaaaaaaaaa

SEQ ID NO: 634 - protein, 337 aa, Gossypium hirsutum
  misc_feature: Ceres CLONE ID no.1857162
  misc_feature: Bit score of 872.6 for HMM based on sequences of FIGURE 4.
  misc_feature (61)..(321): Pfam Name: Sulfotransfer_1 Pfam Description: Sulfotransferase domain
  misc_feature: Functional Homolog Of Ceres SEEDLINE ID no. ME02549 at SEQ ID NO. 590
MVSKSHDVYSSWDDEFKKLVQSFPKEKGWAGSNLYFYQGFWCPSLVLKAFISFQKHFQAFNSDIIVATFPKCGTTWLKALTFSTLYRNQFPWDENPLLTFGPHQLVRFFEYDLYLNNPFPDLRNVCAYQPRLFSTHAPYATLPTSIKDSGCKIVYICRNPMDMFISLWLFSAKLRDKNQESLSLDEAFDKFYHGISAHGPFFDHVLGYWKASQENPNKILFLNFEDLKEDMDSHLKILAMFLGVPFTDDEEKQGVVEKIAKICSFENLKELEVNMKDVHTSGVPHTHFFRKGEVGDWSNYLTPFMIECLEKLIQEKLNGSGLTFKLLSETANNIASP

SEQ ID NO: 635 - protein, 333 aa, Medicago truncatula
  misc_feature: Public GI ID no.92888243
  misc_feature: Bit score of 536.8 for HMM based on sequences of FIGURE 4.
  misc_feature (69)..(330): Pfam Name: Sulfotransfer_1 Pfam Description: Sulfotransferase domain
  misc_feature: Functional Homolog Of Ceres SEEDLINE ID no. ME02549 at SEQ ID NO. 590
MTKSSDENPTLPKYLKEDDLGQECKDLIQTLPLVEGWIDPTFHEYQGFWFAPKILQGALSFQKHFQAIDTDIILVTNPKSGTTWLKALTFALINRNKYPNIHKNHPLLTSNPHVLVPFMEINLYYETDIVPELNSLSPPRIFSTHNPYVLLPKSLKESNCKVVYLCRDPKDTFVSLWHFSNKLREQSRGTLPLEEAFESFCRGTTSYGPFWDHVLGYWKESLERPEKVMFLKYEEMKMKPNFVLKEIAKFLGCPFSEEEESNGVVDDILHLCSFEKLSNLEINKNGKISSEIENKNFFRLGKVGDWKNLLTTKMVEQLNIVVEEKFGKHGLSF

SEQ ID NO: 636 - protein, 349 aa, Medicago truncatula
  misc_feature: Public GI ID no.92879395
  misc_feature: Bit score of 743.3 for HMM based on sequences of FIGURE 4.
  misc_feature (77)..(342): Pfam Name: Sulfotransfer_1 Pfam Description: Sulfotransferase domain
  misc_feature: Functional Homolog Of Ceres SEEDLINE ID no. ME02549 at SEQ ID NO. 590
MASTDLKHMKEDQSRDGQEKISEENKVIHDYNNLILSLPREDDGSVSQYLYFYHEFWCPSTFIQSTISFQNNFHAKDSDIIAASMPKSGSTWLKGLAYAIVNRQYFTSLENKHPLLLSNPHELVPQFEASLYGGKDPVLTQVDVPNMTEPRLFGTHMPFPSLPKSVKESNCKIIYICRNPFDIFVSYWTFFNKIRLKKSLTELTLEEAFERYCKGICIFGPFWENMLGYFKESIERPYRVLFLKYEDLKEDVNFNIKRIAEFVGIPFTQEEENNGVIENIIKLCSFESMKESNGNNSGTVTVNVDREFFFRKGEIGDWVNYFSPSMIERLSKIMQEKFSGSSLSFKGCP

SEQ ID NO: 637 - DNA, 1207 bp, Glycine max
  misc_feature: Ceres CLONE ID no.528876
  misc_feature: Encodes the peptide sequence at SEQ ID NO 638
gaaaacacaagcaatcctcaggatcgaatccctttctctcgatccacacaatgccaacggaagctgaatctagtgttacgcccaaatacctgcaagagaatgaactgagccaagagtgtaaggaagtgatatccaccttacccatggaaagaggttgggttgcaagccatctgcaccaatatcaaggcttctggcacaccaccaggcagcttcaaggggttctatcttgtcaaaagcattttaaggcccttgacacagatgtcctcattgtaagcactcccaaatcaggcaccacttggctcaaagcttggacattttccttgcttcacagaaaccaacatgatccaaatacccaaaaccaaaaccatcctttgctattcaacaacccccattttcttgttccattcttggaactagacctctacattgatgacaacactcttcccgaccttacttcattgatcacctctccaaggctcttctccacacatctcccttatgtgtcacttccaaaatctgtgcaagaatcagcttgcaagatcatttatctctgtagagaccccaaagatgctttcatttcactatggcatttcacaaacatgcttaggcccaagagccgagggatgaactcactccaagaggcatttgacaagttttgcagaggagtgagtctctatgggcccttctgggcccatgtgttggactattggcagaagagcctgtcagagcccaacaagatcatgtttatgaggtttgaagaaatgaaaatgaagcttaggcttgttttgcaagagcttgctacttttgtgggttgcccgttttccaaagaagaggaggaagctggtgtggtgaatcatattttgaagctgtgtagctttgataacttgagcaacttgcaagtgaacaagaatgggaaactctcctctggtgaagaacacaaagctttcttccgctgtggccaaattggtgactgcaaaaatcatctcactgctgagatgatccaacaactcaacaccatcactcaagagaaactagctgaacatggactgaggttttagattatatcgttattatttgcaatttttaatacttggtattatgtcatgtgtgcaaaaaaataaatagaattccttttaaatctagcttttgaggggatgaaacaaaagggacgagagaaactcacattttcctcgccaaagcgtgcaat

SEQ ID NO: 638 - protein, 335 aa, Glycine max
  misc_feature: Ceres CLONE ID no.528876
  misc_feature: Bit score of 462.8 for HMM based on sequences of FIGURE 4.
  misc_feature (68)..(332): Pfam Name: Sulfotransfer_1 Pfam Description: Sulfotransferase domain
  misc_feature: Functional Homolog Of Ceres SEEDLINE ID no. ME02549 at SEQ ID NO. 590
MPTEAESSVTPKYLQENELSQECKEVISTLPMERGWVASHLHQYQGFWHTTRQLQGVLSCQKHFKALDTDVLIVSTPKSGTTWLKAWTFSLLHRNQHDPNTQNQNHPLLFNNPHFLVPFLELDLYIDDNTLPDLTSLITSPRLFSTHLPYVSLPKSVQESACKIIYLCRDPKDAFISLWHFTNMLRPKSRGMNSLQEAFDKFCRGVSLYGPFWAHVLDYWQKSLSEPNKIMFMRFEEMKMKLRLVLQELATFVGCPFSKEEEEAGVVNHILKLCSFDNLSNLQVNKNGKLSSGEEHKAFFRCGQIGDCKNHLTAEMIQQLNTITQEKLAEHGLRF

SEQ ID NO: 639 - DNA, 993 bp, Populus balsamifera subsp. trichocarpa
  misc_feature: Ceres ANNOT ID no.1448352
  misc_feature: Encodes the peptide sequence at SEQ ID NO 640
atggagacgaccacaatctcttcaaacggagaaagggagctaaaagatgagattcaaggcttggttgcaagctttcctagtgagaaaaactgggatggagctcccctttatttctataaaggggtctggtatccagttttcgccattagaggggctctttcctttcaacaacatttcattgcacaggacacagatataatactagcgagcatgccaaaatcaggcaccacctggttaaaagctctcacgttctctgttgtaaaccgcaacatttacagtcccaaagagagtcccttactcactaccccacctcatgaactcgttcgtttctttgagatggacctttactcaaaaaaccagctcccagatctcaaacaacttccttcccctaggattttcagctctcactcccattacagaaccttgccacagtccattagagattctggttgcaagattgtttacatatgcaggaatcctttggatcaacttgtctcttattttcattttgctcgcaagttcaaacgagagaatgtcaagcctttatcatcaattgatgaaggtttcgacaacgtttgtcttggtatccagagttatggacccttttgggatagcgtgttggggtactggaaagcaagtttggaaagaccagacaaggtgctgtttttgaaatatgaagatttgaaagaggatataacttttagcttgaagaaactagcagagttcctggtattgcctttctctgagaaagaagagaaagaaggggtcattgaagaaatatcaaagctgtgcagctttgacaatctcaaggatttggaagtgaacagaactggtttctttgaaagcgctggagctccaaacagtaccttctttaggaaagcaaaggtgggagattggtgcaatgatctaagtccttccatggcagaatgttttttgaagatagtggaagaaaagttggctggctctggcttatccttcaaagtatctgaataa

SEQ ID NO: 640 - protein, 330 aa, Populus balsamifera subsp. trichocarpa
  misc_feature: Ceres ANNOT ID no.1448352
  misc_feature: Bit score of 531.8 for HMM based on sequences of FIGURE 4.
  misc_feature (63)..(323): Pfam Name: Sulfotransfer_1 Pfam Description: Sulfotransferase domain
  misc_feature: Functional Homolog Of Ceres SEEDLINE ID no. ME02549 at SEQ ID NO. 590
METTTISSNGERELKDEIQGLVASFPSEKNWDGAPLYFYKGVWYPVFAIRGALSFQQHFIAQDTDIILASMPKSGTTWLKALTFSVVNRNIYSPKESPLLTTPPHELVRFFEMDLYSKNQLPDLKQLPSPRIFSSHSHYRTLPQSIRDSGCKIVYICRNPLDQLVSYFHFARKFKRENVKPLSSIDEGFDNVCLGIQSYGPFWDSVLGYWKASLERPDKVLFLKYEDLKEDITFSLKKLAEFLVLPFSEKEEKEGVIEEISKLCSFDNLKDLEVNRTGFFESAGAPNSTFFRKAKVGDWCNDLSPSMAECFLKIVEEKLAGSGLSFKVSE

SEQ ID NO: 641 - DNA, 1224 bp, Populus balsamifera subsp. trichocarpa
  misc_feature: Ceres ANNOT ID no.1437745
  misc_feature: Encodes the peptide sequence at SEQ ID NO 642
atggatttgcctccaatgaatgcgtggagagctttcttgctgatgctggaaaagatcattaaccacgtaaatgtattctcctatataaaaatggtgattgacacaatcctgccgacacaggcaagtgcttgtcgagtatattataatttgctttgttctgaaagctttagacgtgccattgatccatcgagttccccacctgcaccattcctcactgtctctcacacaattacaattatcattttcatggagacagtcaaagaagataatctccaagaatttctactcacccttccaagtgagaaaaactgggatggtactcccctccttcttttcaatgagacctggtatccagccaactccattagaggtgcagtttcctttcaacaaaacttcagggcacaagactccgacataatactagcgagcatgccaaaatcaggcactacttggttgaaggccctcaccttctcggttgtaagccgtgatcgctacagccccaaagagagtcccttaatcactgccccaccacatgaactagtacctttccttgaggtggatctttacttgaaaagccagaacccagatcttgattttcctcctccaagaattctttcttgtcacacacattacacatctctgccacagtccattagagactccaactgtaaaattgtgtacgtgtgtaggaatcctttggatcaggctgtctctgattttgtttttgttcgaaacagagtatcaggcatcgcaaacccttcatcatcatcatcatcatcatcattaattgatgaaggtttcgagaatatttgtcgtggtgtccagagttacggacccttttggaataatgtgttgagctattggaaagcgagcttggaaagaccagacaaggtgttgtttttgaaatatgaggatctgaaagaggatattatcttgaacttgaagaggttagcagagttcttgggctttcccttcaccgaggaagaagagaaagaaggggttattgaagaaatttcaagactgtgtagttttgacaatctcaaggatttggaagtgaacaaaaatggtgtccgcccttctggaatgcgaaatagtgccttcttcaggaaaggagagacgggagattggggcaatcatcttagtccttccatggctgaacgtttctggaagatcgtggaagaaaagttggatggatctggtttaaccttcaaaatctctcagtaa

SEQ ID NO: 642 - protein, 393 aa, Populus balsamifera subsp. trichocarpa
  misc_feature: Ceres ANNOT ID no.1437745
  misc_feature: Bit score of 443.7 for HMM based on sequences of FIGURE 4.
  misc_feature (122)..(386): Pfam Name: Sulfotransfer_1 Pfam Description: Sulfotransferase domain
  misc_feature: Functional Homolog Of Ceres SEEDLINE ID no. ME02549 at SEQ ID NO. 590
MLEKIINHVNVFSYIKMVIDTILPTQASACRVYYNLLCSESFRRAIDPSSSPPAPFLTVSHTITIIIFMETVKEDNLQEFLLTLPSEKNWDGTPLLLFNETWYPANSIRGAVSFQQNFRAQDSDIILASMPKSGTTWLKALTFSVVSRDRYSPKESPLITAPPHELVPFLEVDLYLKSQNPDLDFPPPRILSCHTHYTSLPQSIRDSNCKIVYVCRNPLDQAVSDFVFVRNRVSGIANPSSSSSSSSLIDEGFENICRGVQSYGPFWNNVLSYWKASLERPDKVLFLKYEDLKEDIILNLKRLAEFLGFPFTEEEEKEGVIEEISRLCSFDNLKDLEVNKNGVRPSGMRNSAFFRKGETGDWGNHLSPSMAERFWKIVEEKLDGSGLTFKISQ

SEQ ID NO: 643 - DNA, 2892 bp, Populus balsamifera subsp. trichocarpa
  misc_feature: Ceres ANNOT ID no.1464146
  misc_feature: Encodes the peptide sequence at SEQ ID NO 644
atgtcgttgacggtgactagagaccagacatgctatctttcccgcgtccctgtttatgaagctgggaggtgtccggaccagcttgggcgtacctcgattaaatatacgggccttgaagtcaacgaccatgagcagaaacaaccttcatggatatatgaatataggcagaaggcccatgagtacaaaggaaaggccagagtccccatgagagtggagcctgtcgaaacctatttttcattgctgatcttgaaaaaaacatcattatcaacatgttatggaggaaggacggcggcggggttacagagctcagcgaagagagcgaggacaatgagcagcacttcggagtcttcctcctcctcctcctcctttaaggacgcgtttggaaattacgctaattatctcaataaacttaatgaaaaacgcgaaagagtggtaaaagcgagccgggatatcaccatgaacagcaaaaaggtcatatttcaagttcatagaatcagtaaggacaacagagacgaagttcttgacaaggcagaaaaggatttagctgctgtgacagaacagtatatcctcaagttggtgaaagaactgcaagggaccgatttctggaagctaagacgagcatactctcctggggttgtacaggaatacgttgaagcggcaacattctgtaaattctgcagaactgggactcttttaaatctggatgaaataaatgctactctgttgccgctaagtgaaccatccgttgagcctttgcaaataaatgtccttgactatttgctggggcttgcagatttgaccggagagctgatgcgattggcgattgggcgaatatcagatggcgagcttgaatatgccaagaagatatgtcagtttgttcatgatatctacagggagctgacccttattgtcccatatatggatgatagttctgacatgaaaacaaagatggatacaatgctccaaagcgtggtgaaaatagagaacgcttgctatggtgttcatgtgagaggatctgaatataccccgctgctgggagccagtgagccaagttcttttttgttggggacagtcatggtgttgcaaagaggcagacataatttgctggaccttaagggaaatagttccttgaagagtttgaaaggagctgcaaagttttccaattgtgcaacttatcgaatgggaacagcttgccctggtttacttgttaaacatcttctatgcacaatcgttctgggcttcaggtttaggcttacgcgcaccacgactattccccacggcccactggacatcctgcaagcccaggagcagagtagaccaatcattgtcaattacacctgtagctcaaggatcagaaaatggctaggaccacctgcactgtgccattgccaggatccatgtgaaagtgcacctaacctttatatgaattatcagggtgtgtttgtaaggagtggtccagacatgtattgcgatttcttagggtgtggacgagggatgaactgtgagaagcgaaggattggttgttcactttgtttaacagtcatggtgttgcaaagaggcagacataatttgctggaccttaagggaaatagttccttgaagagtttgaaaggagctgcaacttgccctggtttacttgttaaacatcttcttctatgcacgatcattctgggcttcagggacatatcatattaccatgtgcaagatgatacagaacccgctatacccacagctataaggattaagggcactttctacagccataaagggcacttcgtttatgagaggagaccattcactgtcaaatacagagcaactatgcttgctagtggttgtcgcttcctcaataccagcacccactggccacttaatgtaattgaaagcatttcttctcgagctacaatgccaaatcccgagcaatctctttctcttcccggatacttgcaagaaaacgtaacctcccaagaatttagagacttgatagtctccatacccactgagaaaggctggattgcaaatcatctccatcaataccaaggtttttggcacacaactaggcaacttcaaggggttctagcttgccaaaaacactttcaagcccaagatggcgatatctttcttgtcaccactcctaaatcaggctctacttggttaaaggcagtgatgtttgccttggtgaatcgggtttcctttcctgacactaaacaacaccctttgctcactaacaaccctcatgctcttttgcctttcttggagatggaatacattggcaaagagaatcttgacttcaccaactacacttttcctaggctgttttcaactcatctcccactcttgtcacttcccagatctgtggaggactctgattgcaagctagtttacttgtgtaggaatcctaaggacattttcgtgtccctttggcacttcactaacaagttgagacccattgattggggtgctagttcacttgaagagacctttgataaattttgtaggggagtgaatttgtacgggccattttgggaccatgttttgggttattggaaggagagcctggaaaggcctcatagggtatttttcttgaagtacgaggaaatgaaaaatgagcccaggattcaattgaggagactgtctgaattcttggggtgtccattttcccttgaagaagagaatagcggtgtcttggatgaaatcttggagctgtgtagttttgaaaacctgagcaatttagaagtgaataatatcggaaggctgcattccggagaggagcatcaggccttttttcgacgaggcgaagttggtgattccatgaattatctcacggctgagatggtggaaaaaattgacatgatcactgagcagaagttgcattgtcatggtttaaagttctag

SEQ ID NO: 644 - protein, 854 aa, Populus balsamifera subsp. trichocarpa
  misc_feature: Ceres ANNOT ID no.1464146
  misc_feature: Bit score of 439.9 for HMM based on sequences of FIGURE 4.
  misc_feature (593)..(851): Pfam Name: Sulfotransfer_1 Pfam Description: Sulfotransferase domain
  misc_feature: Functional Homolog Of Ceres SEEDLINE ID no. ME02549 at SEQ ID NO. 590
MSSTSESSSSSSSFKDAFGNYANYLNKLNEKRERVVKASRDITMNSKKVIFQVHRISKDNRDEVLDKAEKDLAAVTEQYILKLVKELQGTDFWKLRRAYSPGVVQEYVEAATFCKFCRTGTLLNLDEINATLLPLSEPSVEPLQINVLDYLLGLADLTGELMRLAIGRISDGELEYAKKICQFVHDIYRELTLIVPYMDDSSDMKTKMDTMLQSVVKIENACYGVHVRGSEYTPLLGASEPSSFLLGTVMVLQRGRHNLLDLKGNSSLKSLKGAAKFSNCATYRMGTACPGLLVKHLLCTIVLGFRFRLTRTTTIPHGPLDILQAQEQSRPIIVNYTCSSRIRKWLGPPALCHCQDPCESAPNLYMNYQGVFVRSGPDMYCDFLGCGRGMNCEKRRIGCSLCLTVMVLQRGRHNLLDLKGNSSLKSLKGAATCPGLLVKHLLLCTIILGFRDISYYHVQDDTEPAIPTAIRIKGTFYSHKGHFVYERRPFTVKYRATMLASGCRFLNTSTHWPLNVIESISSRATMPNPEQSLSLPGYLQENVTSQEFRDLIVSIPTEKGWIANHLHQYQGFWHTTRQLQGVLACQKHFQAQDGDIFLVTTPKSGSTWLKAVMFALVNRVSFPDTKQHPLLTNNPHALLPFLEMEYIGKENLDFTNYTFPRLFSTHLPLLSLPRSVEDSDCKLVYLCRNPKDIFVSLWHFTNKLRPIDWGASSLEETFDKFCRGVNLYGPFWDHVLGYWKESLERPHRVFFLKYEEMKNEPRIQLRRLSEFLGCPFSLEEENSGVLDEILELCSFENLSNLEVNNIGRLHSGEEHQAFFRRGEVGDSMNYLTAEMVEKIDMITEQKLHCHGLKF

SEQ ID NO: 645 - DNA, 978 bp, Populus balsamifera subsp. trichocarpa
  misc_feature: Ceres ANNOT ID no.1437744
  misc_feature: Encodes the peptide sequence at SEQ ID NO 646
atgcctccaatcacagaagaaaatctccaagaattgctcctcacccttcccagcgagaaaaacattgatggcacaaattctctctatctataccaaggggcttggattccaggttttaacttgagaggtgtggattcctttcaacgccgctttattgctcaagacaccgatataattgtggctagcatgccaaaatcaggcactacttggctgaaagccctagctttctcggttgcagaacgccacatctatggccccagagaaagtcctctactctcgacctcacctcatgaattagtacgtttcttcgagactgacctttactcgaaagaccagcccccagatcttgaacaacttcctcctccgaggattttcggttgtcactcccattacgcaaacttgccagagtccattcgagattccaagtgtaaagttgtgtacatatgtaggaatcctttggaccaaattgtctctttttttcagtttgcacacaagttcaaattagatgatggcacttctttattgtcactggatgaatgctacgagaacatttgtcgtggtgtccagagtcaaggccccttttgggataacgtgttggggtattggaaagcaagcttagaaagaccagacaaggtgttgttcttgaagtatgaggagctgaaagaggatatagtccttaacttgaagaaactggctgagttcttggggcttcccttcaccgacaaagaagaagaagaaggggttattgaagaaatatcaaggttgtgcagctttgacaatctcaggaatttggaagtgaacaaaaatggtgttcgtccattatctggggctccaaatagtgccttcttcaggaaaggagaggtgggcgattgggcaaattatctaagcccttccatggctgaaaaattcttcaatatagtagaagaaaagttggctggatctggtttatccttcaaaacatctcaggaaagtgcctag

SEQ ID NO: 646 - protein, 325 aa, Populus balsamifera subsp. trichocarpa
  misc_feature: Ceres ANNOT ID no.1437744
  misc_feature: Bit score of 483.7 for HMM based on sequences of FIGURE 4.
  misc_feature (55)..(315): Pfam Name: Sulfotransfer_1 Pfam Description: Sulfotransferase domain
  misc_feature: Functional Homolog Of Ceres SEEDLINE ID no. ME02549 at SEQ ID NO. 590
MPPITEENLQELLLTLPSEKNIDGTNSLYLYQGAWIPGFNLRGVDSFQRRFIAQDTDIIVASMPKSGTTWLKALAFSVAERHIYGPRESPLLSTSPHELVRFFETDLYSKDQPPDLEQLPPPRIFGCHSHYANLPESIRDSKCKVVYICRNPLDQIVSFFQFAHKFKLDDGTSLLSLDECYENICRGVQSQGPFWDNVLGYWKASLERPDKVLFLKYEELKEDIVLNLKKLAEFLGLPFTDKEEEEGVIEEISRLCSFDNLRNLEVNKNGVRPLSGAPNSAFFRKGEVGDWANYLSPSMAEKFFNIVEEKLAGSGLSFKTSQESA

SEQ ID NO: 647 - protein, 315 aa, Medicago truncatula
  misc_feature: Public GI ID no.92894684
  misc_feature: Bit score of 464.2 for HMM based on sequences of FIGURE 4.
  misc_feature (69)..(312): Pfam Name: Sulfotransfer_1 Pfam Description: Sulfotransferase domain
  misc_feature: Functional Homolog Of Ceres SEEDLINE ID no. ME02549 at SEQ ID NO. 590
MVKSSDENSFVAKYLQDDDLSQECKELIPTLPSEKAWILTHTYQYQGFWIATKKFQGVLSCQKHFQALDSDIILVTAPKSGTTWLKALTFALLNRNKYPIIHNNHPLLISNPHSLVPFLEIDLYSDKDYVPNLNSLSHPRLFSTHIPCALLPKSVKESTCKVVYLCRDPKDMFVSLYFGISQTRGVSSYGPFWEHVLGYWKENLERPEKVMFIKFEEMKMKPSFYLKKIAEFLGCPFFNEEESKGMIDDILNLCSFENLSNLEVNKTVRVATGVENKAFFRRGQVGDWKNLLTAEMIKQLNTITENKLGKHGLSF

SEQ ID NO: 648 - protein, 410 aa, Populus balsamifera subsp. trichocarpa
  misc_feature: Ceres ANNOT ID no.1509601
  misc_feature: Bit score of 634.2 for HMM based on sequences of FIGURE 9.
  misc_feature (117)..(343): Pfam Name: Trehalose_PPase Pfam Description: Trehalose-phosphatase
  misc_feature: Functional Homolog Of Ceres SEEDLINE ID no. ME20095 at SEQ ID NO. 1129
MTNQNVVVADTNSGLNLAITVHVTNSSIFTTAAQKPPAAPGGYISISRKKLLKNLEINGGARINAWVDSMRASSPTHIKSTPSVNEDQSSWILHHPSALEMFEQIIDASKGKQIVMFLDYDGTLSPIVDDPDKAFMSKQVMRATVRKLARFFPTAIVSGRCRDKVYNFVRLAELYYAGSHGMDIKGPAKGSKYKKAASEFLPMIDEVYEELVEKTKTTPGAKVENNKFCLSVHYRCVDEKKWSGLAQVVKSVLKEYPKLRLTQGRKVLEIRPTIKWDKGKALEFLLESLGFANCTDVFPVYIGDDRTDEDAFKVLRERGQGFGILVSKIPKDTSASYSLQEPTQATWHALAQTHLHVLGTSNRKQSPKFFTNDACKRKVLEPTVASFVNIPLLIISKATPARRLRKGGIV

SEQ ID NO: 649 - DNA, 1154 bp, Arabidopsis thaliana
  misc_feature: Ceres CLONE ID no.3964
  misc_feature: Encodes the peptide sequence at SEQ ID NO 650
aaagcatcaaataagtaaataaaaactcttttatgttcacctttttcactatcctctctttgtgtttcaaatcgtgggaacaaattatcacaatggaggcttctaaagaagctcatcaccttccaaactacatgaaagacgacaacgttagtcaagaaaccaagaacttgatcacttctctaccttcagacaaagatttcatgggttatggtctctacaactacaaaggttgttggtactatccaaacacactccaagccgttcttgacgtccaaaaacacttcaagccacgagatactgatataatcctcgcttctttgcccaaaggtggaaccacttggctcaaatccctaattttcgctgttgtacatagagaaaagtaccgcggaacccctcaaacacatcctttgctcttacaaaaccctcatgaccttgtcccatttcttgaggttgagttatacgctaatagccaaattccggatctcgcaaagtattcttctcctatgatcttttctacacacatgcacttacaagcattgcgtgaagccaccacaaaagcttgcaaaaccgtatatgtgtgtagaggtatcaaagatacgtttgtctccggctggcattatagaaacatgttgcatcgcaccaagatggatcaagccacttttgagctcatgtttgatgcttattgtagaggagttctcttatatggaccttattgggaacatgtattgagctattggaaagggagcttggaagcaaaggagaatgttcttttcatgaagtacgaagagataattgaggagcctcgtgttcaagtcaagagactcgccgagttcttggaatgtccattcaccaaggaagaagaagaaagtggatcggtggaggagatcttgaagttgtgtagtttacgaaatttaagcaatttggaggttaataagaatgggacaacgagaattggtgtagattctcaggtgttctttaggaaaggtgaagttggtgattggaagaatcatcttacgccacaaatggcgaaaacctttgatgagattattgactatagactaggagactccggtttgatatttcaataaggttgtgttgtgttttttttcttttgtcatccgaaaataaattaggactcaaacgagtcattcttg

SEQ ID NO: 650 - protein, 351 aa, Arabidopsis thaliana
  misc_feature: Ceres CLONE ID no.3964
  misc_feature: Bit score of 390.0 for HMM based on sequences of FIGURE 4.
  misc_feature (88)..(347): Pfam Name: Sulfotransfer_1 Pfam Description: Sulfotransferase domain
  misc_feature: Functional Homolog Of Ceres SEEDLINE ID no. ME02549 at SEQ ID NO. 590
MFTFFTILSLCFKSWEQIITMEASKEAHHLPNYMKDDNVSQETKNLITSLPSDKDFMGYGLYNYKGCWYYPNTLQAVLDVQKHFKPRDTDIILASLPKGGTTWLKSLIFAVVHREKYRGTPQTHPLLLQNPHDLVPFLEVELYANSQIPDLAKYSSPMIFSTHMHLQALREATTKACKTVYVCRGIKDTFVSGWHYRNMLHRTKMDQATFELMFDAYCRGVLLYGPYWEHVLSYWKGSLEAKENVLFMKYEEIIEEPRVQVKRLAEFLECPFTKEEEESGSVEEILKLCSLRNLSNLEVNKNGTTRIGVDSQVFFRKGEVGDWKNHLTPQMAKTFDEIIDYRLGDSGLIFQ

SEQ ID NO: 651 - protein, 331 aa, Arabidopsis thaliana
  misc_feature: Public GI ID no.13272389
  misc_feature: Bit score of 390.0 for HMM based on sequences of FIGURE 4.
  misc_feature (68)..(327): Pfam Name: Sulfotransfer_1 Pfam Description: Sulfotransferase domain
  misc_feature: Functional Homolog Of Ceres SEEDLINE ID no. ME02549 at SEQ ID NO. 590
MEASKEAHHLPNYMKDDNVSQETKNLITSLPSDKDFMGYGLYNYKGCWYYPNTLQAVLDVQKHFKPRDTDIILASLPKGGTTWLKSLIFAVVHREKYRGTPQTHPLLLQNPHDLVPFLEVELYANSQIPDLAKYSSPMIFSTHMHLQALREATTKACKTVYVCRGIKDTFVSGWHYRNMLHRTKMDQATFELMFDAYCRGVLLYGPYWEHVLSYWKGSLEAKENVLFMKYEEIIEEPRVQVKRLAEFLECPFTKEEEESGSVEEILKLCSLRNLSNLEVNKNGTTRIGVDSQVFFRKGEVGDWKNHLTPQMAKTFDEIIDYRLGDSGLIFQ

SEQ ID NO: 652 - DNA, 1191 bp, Populus balsamifera subsp. trichocarpa
  misc_feature: Ceres ANNOT ID no.1481203
  misc_feature: Encodes the peptide sequence at SEQ ID NO 653
atgtccattgcaagactcgatcgagcaagctcggaaacacaatatccaaaacgatcattagccgtttatgggagatgcacagacacttctcatgtgtatagtgtcctggggttggaaagcatgccgactgaattttttggaagccaacttgaggtcgaaacttggcaagcatttgtgattcttagtttgatggagtgtgtggaaatcactgtagaggaagagcagagagatgaaagtacccaggagttgcttcaacacctcccaacagaaataggtatgggaggcaatcttctctatctataccaaggattctggtgtccacaggtatcaatcaagggcatgatgttgtttcaacaacacttcaaggcacaagaaactgacctcatacttgccagcattccaaaatcaggtacaacttggttaaaggccttgatttatactatagttaatcgctcccatcactctcttgaaaagagccctttgctcaccaatggccctcatggggtggtgccctttcttgagtttgatatcagctccaaaaaccagtttctggaacaagacaagcttcccgagcctaggattttcggaacccactcaccttacacggcactcccgtgttcggtcaaagattctgctgctaagattgtgtatgtgtgtcggaatcctctggacatgttcatttcctattggaaattcagtgtcaatatcccgaaggagaatgagaaacacctttcactaggagacgcttttgacaagttctgtcagggacttcatggctacggtccattttgggatcatttattagggtattggaaggcaagcttggagagacctgataaggtcttgtttctgaaatacgaggacattaaaaagaacaatgtccctagcatcaagaagctggctacctttctggggcttcctttctctgtggaggaagagaagcaaggtttgatagaggaaacatcaaggctatgcagcgttgaaagcatgaaaaaccatgaagcaaccatgacaggcacaggccctcttgggatcccagctagtgccttcctcaggaaaggaaaggtgggagattcactgaattatctaacaccctcaatggtgagccgtgtggagaatctgattcaagagaagctccaagattctggtctctgcttctgtctgtctagcactttccaaaatagtgcttga

SEQ ID NO: 653 - protein, 333 aa, Populus balsamifera subsp. trichocarpa
  misc_feature: Ceres ANNOT ID no.1481203
  misc_feature: Bit score of 476.0 for HMM based on sequences of FIGURE 4.
  misc_feature (62)..(320): Pfam Name: Sulfotransfer_1 Pfam Description: Sulfotransferase domain
  misc_feature: Functional Homolog Of Ceres SEEDLINE ID no. ME02549 at SEQ ID NO. 590
MECVEITVEEEQRDESTQELLQHLPTEIGMGGNLLYLYQGFWCPQVSIKGMMLFQQHFKAQETDLILASIPKSGTTWLKALIYTIVNRSHHSLEKSPLLTNGPHGVVPFLEFDISSKNQFLEQDKLPEPRIFGTHSPYTALPCSVKDSAAKIVYVCRNPLDMFISYWKFSVNIPKENEKHLSLGDAFDKFCQGLHGYGPFWDHLLGYWKASLERPDKVLFLKYEDIKKNNVPSIKKLATFLGLPFSVEEEKQGLIEETSRLCSVESMKNHEATMTGTGPLGIPASAFLRKGKVGDSLNYLTPSMVSRVENLIQEKLQDSGLCFCLSSTFQNSA

SEQ ID NO: 654 - protein, 326 aa, Arabidopsis thaliana
  misc_feature: Public GI ID no.15227699
  misc_feature: Bit score of 411.0 for HMM based on sequences of FIGURE 4.
  misc_feature (65)..(321): Pfam Name: Sulfotransfer_1 Pfam Description: Sulfotransferase domain
  misc_feature: Functional Homolog Of Ceres SEEDLINE ID no. ME02549 at SEQ ID NO. 590
MSSSSSVPAYLGDEDLTQETRALISSLPKEKGWLVSEIYEFQGLWHTQAILQGILICQKRFEAKDSDIILVTNPKSGTTWLKALVFALLNRHKFPVSSSGNHPLLVTNPHLLVPFLEGVYYESPDFDFSSLPSPRLMNTHISHLSLPESVKSSSCKIVYCCRNPKDMFVSLWHFGKKLAPEETADYPIEKAVEAFCEGKFIGGPFWDHILEYWYASRENPNKVLFVTYEELKKQTEVEMKRIAEFLECGFIEEEEVREIVKLCSFESLSNLEVNKEGKLPNGIETKTFFRKGEIGGWRDTLSESLAEEIDRTIEEKFKGSGLKFSS

SEQ ID NO: 655 - protein, 316 aa, Medicago truncatula
  misc_feature: Public GI ID no.92886084
  misc_feature: Bit score of 557.9 for HMM based on sequences of FIGURE 4.
  misc_feature (45)..(309): Pfam Name: Sulfotransfer_1 Pfam Description: Sulfotransferase domain
  misc_feature: Functional Homolog Of Ceres SEEDLINE ID no. ME02549 at SEQ ID NO. 590
MASKDLTNFTEYQSKDVQLEAFGEEDSKCKELILSLPKEYYGPKDSDVVVASMPKTGTTWLKALTFAIVNRNRFSSLENHPLLTSNSHELVPSLESNVYVDTISQFPKFDILNMIEPRLFGTHIPFASLAKSIKESNCKIIYICRNPFDTYVSYWNFMNKISLNFDFPTITIEDDFERYCKGICHVGSFWDHVLGYLNESIARPDKVLFMKYEDLKENGNSHVKRIAEFLDCPFTQEEESNGVIENIINLCSFKKMKELEANKFGEFGRKIEKNYLFRKAEVGDWINYLSPSMVEKLSKIIEEKFSGSGLSFKVCT

SEQ ID NO: 656 - protein, 331 aa, Arabidopsis thaliana
  misc_feature: Public GI ID no.15239947
  misc_feature: Bit score of 392.3 for HMM based on sequences of FIGURE 4.
  misc_feature (64)..(328): Pfam Name: Sulfotransfer_1 Pfam Description: Sulfotransferase domain
  misc_feature: Functional Homolog Of Ceres SEEDLINE ID no. ME02549 at SEQ ID NO. 590
MAGKSDLPVIARDDNLSEETKTLISSLPTYQDSHVKLCKYQGCWYYHNTLQAVINYQRNFQPQDTDIILASFPKSGTTWLKALSVAIVERSKQPFDDDPLTHPLLSDNPHGIVPFFEFDMYLKTSTPDLTKFSTSSPRLFSTHMPLHTFKEGLKGSPCKVVYMCRNIKDVLISDWHFRSKYSNNEVSRSTLESMFESFCGGVSFYGPFWDHALSYWRGSLENPKHVLFMRYEEMKTEPCVQVKRLAEFLGFPFTKEEEDSGSISKLLELCSLGNLSGLEVNKTGKTWMNYDYKSYFRKGEVGDWKNHLTPEMENKIDMIIEEKLKGSDLKF

SEQ ID NO: 657 - DNA, 1207 bp, Arabidopsis thaliana
  misc_feature: Ceres CLONE ID no.34878
  misc_feature: Encodes the peptide sequence at SEQ ID NO 658
acaacactcgacacagaagcaaaaacaaaaatgggtgagaaagatattccaaggaacttgaaggaagaagaagaaaaccaaagtgaagattccaaaagtttgatctcttcacttccttcagacatagattgctctgggaccaagttgtacaagtatcaaggatgttggtacgataaagacattctccaagcaatcctcaaattcaacaaaatctttcagccacaagaaaccgatataattgttgcttctttccccaaatcaggtacgacttggctcaaggcactcacattcgcactcgctcaaagatcaaaacatacttcagaaaatcatcctctgctaactcataatcctcatgagctagtgccgtacctcgagctcgatctttatctcaaaagctcgaaaccggatatgtccaagttaccatcatcatctccgagattgttctcaacccacatgtctttcgatgcgcttaaagtaccaatgaaggagactccttgcaagatagtgtatgtgtgcaggaacgtaaaagacgtgttggtatcactttggtgtttcgaaaactccattagtggagaaaacaatttaagtctcgaggctttgttcgagtctttatgtagcggagttaacttatgcggtcccttgtgggaaaatgtgttaggctattggagaggaagcttggaagatcctaagcatgtgcttttcttgaggtacgaggagttgaagacggagcctcgtgtgcaaatcaagagacttgcagagttcttagattttccattcacaaaggaagaagaagatagtggaggtgtagacaagatcttggaactttgttctctaagaaaccttagcggtttggagatcaacaaaacaggaagcttgtcggaaggagtaagtttcaagagttttttccgtaaaggggaagttggtgattggaagagttatatgactcctgaaatggaaaacaaaatcgacatgattgttgaggagaaacttcaaggctctggtttgatattgtagagttcatatctctatgtatatgtgaacaggtttaatctcaaacctaataatgctggtttgttcttttcttgtatgcaatgtaataaaagttactttgatgtaaggttaagagtttaagattctgagcgatgtgtcgtttttgtttcctttgataatcaataaagctagcggcttttcttcttcgccaaggcat

SEQ ID NO: 658 - protein, 327 aa, Arabidopsis thaliana
  misc_feature: Ceres CLONE ID no.34878
  misc_feature: Bit score of 428.2 for HMM based on sequences of FIGURE 4.
  misc_feature (66)..(324): Pfam Name: Sulfotransfer_1 Pfam Description: Sulfotransferase domain
  misc_feature: Functional Homolog Of Ceres SEEDLINE ID no. ME02549 at SEQ ID NO. 590
MGEKDIPRNLKEEEENQSEDSKSLISSLPSDIDCSGTKLYKYQGCWYDKDILQAILKFNKIFQPQETDIIVASFPKSGTTWLKALTFALAQRSKHTSENHPLLTHNPHELVPYLELDLYLKSSKPDMSKLPSSSPRLFSTHMSFDALKVPMKETPCKIVYVCRNVKDVLVSLWCFENSISGENNLSLEALFESLCSGVNLCGPLWENVLGYWRGSLEDPKHVLFLRYEELKTEPRVQIKRLAEFLDFPFTKEEEDSGGVDKILELCSLRNLSGLEINKTGSLSEGVSFKSFFRKGEVGDWKSYMTPEMENKIDMIVEEKLQGSGLIL

SEQ ID NO: 659 - DNA, 1212 bp, Arabidopsis thaliana
  misc_feature: Ceres CLONE ID no.150484
  misc_feature: Encodes the peptide sequence at SEQ ID NO 660
acaacactcgacacaaaagcaaaaacaaaaatgggtgagaaagatattccaaggaacttgaaggaagaagaagaagaagaagaagaaaaccaaagtgaagaaaccaaaagtttgatctcttcacttccttcagacatagattgctcagggaccaagttgtacaagtaccaaggatgttggtacgacaaagatattctccaagcaatcctcaatttcaacaaaaactttcagccacaagaaacggatataattgttgcttctttccccaaatcgggtacgacttggctcaaggcactcacattcgcactcgcgcaaagatcaaaacacacttcagacaatcatcctctgctaactcataatcctcatgagctagtgccgtacctcgagctcgatctttatctcaaaagctcgaaaccggatttgaccaagttgccatcatcatctccgagattgttctcaacccacatgtcctttgatgcgcttaaagtaccgttgaaagagtctccttgcaagatcgtgtacgtgtgcaggaacgtgaatgacgtattgatatcactttggtgtttcgaaaactccatgagtggagaaaacaatttaagtctcgaggctttgttcgagtctttatgtagcggagttaacttatgcggtcccttatgggaaaatgtgttaggctattggagaggaagcttggaagatcctaagcatgtgcttttcttgaggtacgaggagttgaagacggagcctcgtgtgcaaatcaagagacttgcagagttcttagattgtccattcacaaaggaagaagaagatagtggaggtgtagacaagatcttggaactttgttctctaagaaaccttagcggtttggagatcaacaaaacaggaagcttgtcggaaggagtaagtttcaagagttttttccgtaaaggggaagttggtgattggaagagttatatgactcctgaaatggaaaacaaaatcgacatgattgttgaggagaaacttcaaggctctggtttgaaattgtagagttcatatctctatgtatatgtgtgggaacaggtttaatctcaaacctaataatgctggtttgttcttttcttgtatgcaatgtaataaaagttactttgatgtaaggttaagagtttaagattcttagtgatgtgttgttgtttttgtttcgtttgataacgaataaagctagcggcttttctc

SEQ ID NO: 660 - protein, 331 aa, Arabidopsis thaliana
  misc_feature: Ceres CLONE ID no.150484
  misc_feature: Bit score of 451.9 for HMM based on sequences of FIGURE 4.
  misc_feature (70)..(328): Pfam Name: Sulfotransfer_1 Pfam Description: Sulfotransferase domain
  misc_feature: Functional Homolog Of Ceres SEEDLINE ID no. ME02549 at SEQ ID NO. 590
MGEKDIPRNLKEEEEEEEENQSEETKSLISSLPSDIDCSGTKLYKYQGCWYDKDILQAILNFNKNFQPQETDIIVASFPKSGTTWLKALTFALAQRSKHTSDNHPLLTHNPHELVPYLELDLYLKSSKPDLTKLPSSSPRLFSTHMSFDALKVPLKESPCKIVYVCRNVNDVLISLWCFENSMSGENNLSLEALFESLCSGVNLCGPLWENVLGYWRGSLEDPKHVLFLRYEELKTEPRVQIKRLAEFLDCPFTKEEEDSGGVDKILELCSLRNLSGLEINKTGSLSEGVSFKSFFRKGEVGDWKSYMTPEMENKIDMIVEEKLQGSGLKL

SEQ ID NO: 661 - protein, 331 aa, Arabidopsis thaliana; identical to SEQ ID NO: 660
  misc_feature: Public GI ID no.21553545
  misc_feature: Bit score of 451.9 for HMM based on sequences of FIGURE 4.
  misc_feature (70)..(328): Pfam Name: Sulfotransfer_1 Pfam Description: Sulfotransferase domain
  misc_feature: Functional Homolog Of Ceres SEEDLINE ID no. ME02549 at SEQ ID NO. 590

SEQ ID NO: 662 - protein, 331 aa, Arabidopsis thaliana
  misc_feature: Public GI ID no.15222843
  misc_feature: Bit score of 455.9 for HMM based on sequences of FIGURE 4.
  misc_feature (70)..(328): Pfam Name: Sulfotransfer_1 Pfam Description: Sulfotransferase domain
  misc_feature: Functional Homolog Of Ceres SEEDLINE ID no. ME02549 at SEQ ID NO. 590
MGEKDIPRNLKEEEEEEEENQSEETKSLISSLPSDIDCSGTKLYKYQGCWYDKDILQAILNFNKNFQPQETDIIVASFPKSGTTWLKALTFALAQRSKHTSDNHPLLTHNPHELVPYLELDLYLKSSKPDLTKLPSSSPRLFSTHMSFDALKVPLKESPCKIVYVCRNVKDVLVSLWCFENSMSGENNLSLEALFESLCSGVNLCGPLWENVLGYWRGSLEDPKHVLFLRYEELKTEPRVQIKRLAEFLDCPFTKEEEDSGGVDKILELCSLRNLSGLEINKTGSLSEGVSFKSFFRKGEVGDWKSYMTPEMENKIDMIVEEKLQGSGLKL

SEQ ID NO: 663 - protein, 323 aa, Brassica napus
  misc_feature: Public GI ID no.38230552
  misc_feature: Bit score of 398.1 for HMM based on sequences of FIGURE 4.
  misc_feature (63)..(318): Pfam Name: Sulfotransfer_1 Pfam Description: Sulfotransferase domain
  misc_feature: Functional Homolog Of Ceres SEEDLINE ID no. ME02549 at SEQ ID NO. 590
MSSSSSSYLRDEDLTQETRDLISSLPSEKGWLVSQMYQFQGRWHTQALLQGLLQYQKHFEAKDSDIILVTNPKSGTTWLKALVFSLINRHKFPVSSGDHPLLVTNPHLLIPFLEGVYYESPNFDFTELPSPRLMNTHISLLSLPESVKSSSCKIVYCCRNPKDMFVSLWHFGKKLASQETADYPIEKAVEAFCQGKFIGGPFWDHVLEYWYASLENPNKVLFVTYEELKKQTGDTIKRIAEFLGCGFIEEEEVGGIVKLCSFESLSSLEANREGKLPNGVETKAFFRKGEVGGWRDTLSESLAEEIDRTMEEKFQGSGLKFSC

SEQ ID NO: 664 - protein, 325 aa, Brassica napus
  misc_feature: Public GI ID no.3420008
  misc_feature: Bit score of 407.1 for HMM based on sequences of FIGURE 4.
  misc_feature (65)..(320): Pfam Name: Sulfotransfer_1 Pfam Description: Sulfotransferase domain
  misc_feature: Functional Homolog Of Ceres SEEDLINE ID no. ME02549 at SEQ ID NO. 590
MSSSSSVPDYLRDEKLTQETRDLISSLPSEKGWLVSQIYQFQGRWHTEALLQGILTCQKHFKAKDSDIILVTNPKSGTTWLKSLVFALINRHKFPVSSGDHPLLVTNPHLLVPFMEGVYYESPDFDFSLLPFPRLMNTHISHLSLPESVKSSSCQIVYCCRNPKDMFVSLWHFGKKLAPQETADYPLEKAVEAFCQGKFIAGPFWDHVLEYWYASLENPNKVLFVTYEELKKQTEVEVKRIAEFIGCGFTAEEEVSEIVKLCSFESLSRLEVNRQGKLPNGIETNAFFRKGEIGGWRDTLSESLADAIDRTTEEKFGGSGLKFSC

SEQ ID NO: 665 - protein, 323 aa, Arabidopsis thaliana
  misc_feature: Public GI ID no.15230602
  misc_feature: Bit score of 438.5 for HMM based on sequences of FIGURE 4.
  misc_feature (59)..(320): Pfam Name: Sulfotransfer_1 Pfam Description: Sulfotransferase domain
  misc_feature: Functional Homolog Of Ceres SEEDLINE ID no. ME02549 at SEQ ID NO. 590
MEMNLRIEDLNEETKTLISSLPSDKDFTGKTICKYQGCWYTHNVLQAVLNFQKSFKPQDTDIIVASFPKCGTTWLKALTFALLHRSKQPSHDDDHPLLSNNPHVLVPYFEIDLYLRSENPDLTKFSSSPRLFSTHVPSHTLQEGLKGSTCKIVYISRNVKDTLVSYWHFFTKKQTDEKIISSFEDTFEMFCRGVSIFGPFWDHVLSYWRGSLEDPNHVLFMKFEEMKAEPRDQIKKFAEFLGCPFTKEEEESGSVDEIIDLCSLRNLSSLEINKTGKLNSGRENKMFFRKGEVGDWKNYLTPEMENKIDMIIQEKLQNSGLKF

SEQ ID NO: 666 - protein, 323 aa, Brassica napus
  misc_feature: Public GI ID no.3420004
  misc_feature: Bit score of 385.5 for HMM based on sequences of FIGURE 4.
  misc_feature (64)..(318): Pfam Name: Sulfotransfer_1 Pfam Description: Sulfotransferase domain
  misc_feature: Functional Homolog Of Ceres SEEDLINE ID no. ME02549 at SEQ ID NO. 590
MESSSVPVYLKDENLTQETRDLLSSLPSEKGWLVSQMYQFEGIWQTQALVQGIVNCQKHFEANDSDVILATLAKSGTTWLKALLFALIHRHKFPVSGKHPLLVTNPHSLVPYLEGDYCSSPEVNFAELPSPRLMQTHLTHHSLPVSIKSSSCKIIYCCRNPKDMFVSIWHFGRKLAPEKTAEYPIETAVAAFCKGKFIGGPFWDHVLEYWYESLKNPNKVLFVTYEELKKQTEVEVKRIAEFIGCGFTAEEEVSEIVKLCSFESLSSLEVNRQGKLPNGIESNAFFRKGETGGWRDTLSESLADVIDRTTEQKFGGSGLKFSS

SEQ ID NO: 667 - protein, 302 aa, Arabidopsis thaliana
  misc_feature: Public GI ID no.2129586
  misc_feature: Bit score of 339.7 for HMM based on sequences of FIGURE 4.
  misc_feature (65)..(301): Pfam Name: Sulfotransfer_1 Pfam Description: Sulfotransferase domain
  misc_feature: Functional Homolog Of Ceres SEEDLINE ID no. ME02549 at SEQ ID NO. 590
MSSSSSVPAYLGDEDLTQETRALISSLPKEKGWLVSEIYEFQGLWHTQAILQGILICQKRFEAKDSDIILVTNPKSGTTWLKALVFALLNRHKFPVSSSGNHPLLVTNPHLLVPFLEGVYYESPDFDFSSLPSPRLMNTHISHLSLPESVKSSSCKIVYCCRNPKDMFVSLWHFGKKLAPEETADYPIEKAVEAFCEGKFIGGPFWDHILEYWYASRENPNKVLFVTYEELKKQTEVEMKRIAEFLECGFIEEEEVREIVKLCSFESLSNLEVNKEGKLPNGIETKTFFRKGEIGGWRDSFE

SEQ ID NO: 668 - protein, 326 aa, Arabidopsis thaliana
  misc_feature: Public GI ID no.15217849
  misc_feature: Bit score of 370.9 for HMM based on sequences of FIGURE 4.
  misc_feature (62)..(323): Pfam Name: Sulfotransfer_1 Pfam Description: Sulfotransferase domain
  misc_feature: Functional Homolog Of Ceres SEEDLINE ID no. ME02549 at SEQ ID NO. 590
MDETKIPKKLQSDDEENISLISSLPFDVDFDSTKLFKYQGCWYDDKTLQGVLNFQRGFEPQDTDIIIASFPKSGTTWLKALTVALLERSKQKHSSDDHPLLLDNPHGLVPFLELRLFTETSKPDLTSISSSPRLFSTHVAFQTLREALKNSPCKIVYVWRNVKDVLVSFWYFNSAKLKIEEERSILDSMFESFCRGVINYGPSWEHVLNYWRASLEDSKNVLFLKYEELKTEPRVQLKRLAEFLDCPFTVEEEERGSVEEILDLCSLRNLKNLEINKTGKTLRGADHKIFFRKGEVGDSKNHLTPEMEKIIDMITEEKFEGSDLKF

SEQ ID NO: 669 - protein, 324 aa, Arabidopsis thaliana
  misc_feature: Public GI ID no.15227704
  misc_feature: Bit score of 395.0 for HMM based on sequences of FIGURE 4.
  misc_feature (66)..(319): Pfam Name: Sulfotransfer_1 Pfam Description: Sulfotransferase domain
  misc_feature: Functional Homolog Of Ceres SEEDLINE ID no. ME02549 at SEQ ID NO. 590
MTKSETTLSKLLVESELVQECEELLSSLPRDRSVFAEYLYQYQGFWYPPNLLEGVLYSQKHFQARDSDIVLASIPKSGTTWLKSLVFALIHRQEFQTPLVSHPLLDNNPHTLVTFIEGFHLHTQDTSPRIFSTHIPVGSLPESVKDSSCKVVYCCRNPKDAFVSLWHFMKNLIVKEMVGCTMEEMVRFFCRGSSIYGPFWDHVLQYWKESRENPKKVMFVMYEEMREQPQEWVMRIAEFLGYSFTEEEIENGVLEDIIKLCSLENLSKLEVNEKGKLLNGMETKAFFRKGEIGGWRDTLTPLLAEEIDKTTKEKLIGSDFRFFC

SEQ ID NO: 670 - DNA, 1479 bp, Populus balsamifera subsp. trichocarpa
  misc_feature: Ceres ANNOT ID no.1465750
  misc_feature: Encodes the peptide sequence at SEQ ID NO 671
atggaatcctctttgccttccacccaaatcttggattctggtgacagtgcagagaggaaaaatgaagctaaaaattacaatgaagtgatgtccacctttccgaaagttaaaggcttgaatgggtatgattattacctgtaccaaggcttttggtacgctcccttcttcttggaaggactcatgtctgttcaagagggcttcaatcctcaatccactgatatatttgtcgccagttttccaaaaactggcacaacttggcttaaggccctcacttttgctattgtcacacgatcccgtttaagtggttcaacaactagttctttacttaccaagatgccacatgactgtgttccttttttggaatatgaccttgctcaaaaccccagtaatcgggacttggcaattcctctggtatctactcatgttccttacacttgtttacctaaatctatcatttcttctagttgcaagattatttacatttgcagggacgcaaaggatgcttttgtttctttgtggtactttcttgccaggctgcaaatgtcgaaaaatgttgaacctcttcctctggaaggggcatttgagttgttttgcaatggaattgcaaattttggaccatattgggaccatgttttagggtattggagagcaagcttcgagttccctgagaagatattgttcttgacatatgaggaaatgaagcaagacacagctgctcatgttaagaaattagctgagttcatgggttgttctttcaccttagaggaagaggagggaggggaggtgcaaaagataataagcatgtgtagttttgagaagttgagcagcttggaggtcaataaaaatgggaagcaccgtccggacacatcacttgctattcaaaacagtgtatacttcaggagaggtgagataggcgactgggcaaatcacttgacacctgaaatgggagcacgtctagatgacataatggagcagaaactcaagggttcaggcttgaagctgcccagggaaaaaatgacagaaagtgagttgcagggaatgaaaaaggcattagtaaactcaacacctttcaggagaatgagaaagcacaaactctttaagagaagatattctccggcaatggcatcaaacagaaaagtccgacgtcaactaaccactgctttttctcttctccttctcttctcgttctccttcgtcttctgcattctctactgttcacgtgaacaatggagagtggagagcagctcaccatcaacccctgctgtttccaccgccagccactgctcttcctcttccccttctccttcgtcttttacgttctccactgttaatgtgaacagtggagagcagctcaccaccggccttcactatttccactgccagccactgctcttcctcttccccttccccttctccttccccttctccttctcattcatcttctgcattctccactgttcatggccggactgggcctag

SEQ ID NO: 671 - protein, 492 aa, Populus balsamifera subsp. trichocarpa
  misc_feature: Ceres ANNOT ID no.1465750
  misc_feature: Bit score of 435.5 for HMM based on sequences of FIGURE 4.
  misc_feature (71)..(331): Pfam Name: Sulfotransfer_1 Pfam Description: Sulfotransferase domain
  misc_feature: Functional Homolog Of Ceres SEEDLINE ID no. ME02549 at SEQ ID NO. 590
MESSLPSTQILDSGDSAERKNEAKNYNEVMSTFPKVKGLNGYDYYLYQGFWYAPFFLEGLMSVQEGFNPQSTDIFVASFPKTGTTWLKALTFAIVTRSRLSGSTTSSLLTKMPHDCVPFLEYDLAQNPSNRDLAIPLVSTHVPYTCLPKSIISSSCKIIYICRDAKDAFVSLWYFLARLQMSKNVEPLPLEGAFELFCNGIANFGPYWDHVLGYWRASFEFPEKILFLTYEEMKQDTAAHVKKLAEFMGCSFTLEEEEGGEVQKIISMCSFEKLSSLEVNKNGKHRPDTSLAIQNSVYFRRGEIGDWANHLTPEMGARLDDIMEQKLKGSGLKLPREKMTESELQGMKKALVNSTPFRRMRKHKLFKRRYSPAMASNRKVRRQLTTAFSLLLLFSFSFVFCILYCSREQWRVESSSPSTPAVSTASHCSSSSPSPSSFTFSTVNVNSGEQLTTGLHYFHCQPLLFLFPFPFSFPFSFSFIFCILHCSWPDWA

SEQ ID NO: 672 - DNA, 1153 bp, Gossypium hirsutum
  misc_feature: Ceres CLONE ID no.1983975
  misc_feature: Encodes the peptide sequence at SEQ ID NO 673
gcagacattgaagagctctcctctgctgaggcgattgaaagagtggtggagttcatgtcaacactcccaacagaaaatgggtggaattctttccagcctcttcgcttatacgaaggcttttggaccttccctcatttcctcgaaagcatcatattagctcaacaccgcttcaagcctaaaccaggcgatatcttcctctgtagcgctccgaaaagtggaactacatggctcaaagcactgagtttcgccatcgtcactcgaaacctttacgacacctccaatagtccattacttaccaagggtcctcatcattgtgtcccaaatatggtcgggtttgaatataaaccagacgtccgtcaaccaggtatcccactcatacccacccatgcaccttaccattgtttgcccaaatctgttttgggttccgatgatgttaaagttgtttacatttgtcgggacccgaaagatgcgttcgtttccatgtttcactttgcagccaaccgaaggcctaaggaaaacgaacacattgcgatagaggaggcttttgagcttttctgtctagggaggtctgtttttggaccggcttgggatcatattctgggttattggaaagctagtcaagaacgaccggaaaaggtaatgtttttgaaatacgaagaattgatgaatgatagtgagttgtatgtgaaaaaattggctgagtttatagggtacccttttagctttgaagaagaacaaggtggggtagtgaagaaactaatagatttatgcagttttgagaacttgagtaatttagacgtgaacaagacgggaaaacgacatgaagacgacgatgaggcaacgaacaagacgttcttcagaaaaggcaaggttggggattggcaaaaccatcttacacccgagatggctaatcggctcgacaatatagtggagcaaaaactgagtggaaccggtttgagtttcgaactcaacaatggatcatcttgatggactaaaatcatttgtctttcgggtaataattgtgtgttcatttgcaactgtgtttggttgggatgctttgaatttcttgttcaaagatccaaacatgttattgaaacctatttctctctgttattgagattcatgtttggaataaaaaaaaaaaaaaaaaaaa

SEQ ID NO: 673 - protein, 310 aa, Gossypium hirsutum
  misc_feature: Ceres CLONE ID no.1983975
  misc_feature: Bit score of 361.7 for HMM based on sequences of FIGURE 4.
  misc_feature (43)..(300): Pfam Name: Sulfotransfer_1 Pfam Description: Sulfotransferase domain
  misc_feature: Functional Homolog Of Ceres SEEDLINE ID no. ME02549 at SEQ ID NO. 590
MSTLPTENGWNSFQPLRLYEGFWTFPHFLESIILAQHRFKPKPGDIFLCSAPKSGTTWLKALSFAIVTRNLYDTSNSPLLTKGPHHCVPNMVGFEYKPDVRQPGIPLIPTHAPYHCLPKSVLGSDDVKVVYICRDPKDAFVSMFHFAANRRPKENEHIAIEEAFELFCLGRSVFGPAWDHILGYWKASQERPEKVMFLKYEELMNDSELYVKKLAEFIGYPFSFEEEQGGVVKKLIDLCSFENLSNLDVNKTGKRHEDDDEATNKTFFRKGKVGDWQNHLTPEMANRLDNIVEQKLSGTGLSFELNNGSS

SEQ ID NO: 674 - protein, 332 aa, Oryza sativa subsp. japonica
  misc_feature: Public GI ID no.115477272
  misc_feature: Bit score of 799.4 for HMM based on sequences of FIGURE 4.
  misc_feature (66)..(329): Pfam Name: Sulfotransfer_1 Pfam Description: Sulfotransferase domain
  misc_feature: Functional Homolog Of Ceres SEEDLINE ID no. ME02549 at SEQ ID NO. 590
MAEGRQLEAQSVVVPTATGDKGDDILSSLPTREGWWTTFVLYDGCWMDRQAAMSVSLVRAQFVPRDDDVLLATYPKCGTTWLKALSFAIANRHRHPVVSAGHHPLLTQSPHDLVPFIELPFRHIHPLAAALDAIPSPRLLGTHMPHHLLPPRIGCRIVYLCREPKDVVISTWHFMNKVIEGFSIDFDKAFELFVDGCSPFGPIWNHYLGYWNKHVEEPDRVLFLKYDDMMADPAGHVKKLAEFLRVPFTDDEVDAGVVEEVVRLCSFEKLSRLPVNSSVVAGRVGVDERPMKNSVFFRKGKVRDWKNYLTEEMAKKLDAAIEEKLKGSGLTL

SEQ ID NO: 675 - protein, 333 aa, Arabidopsis thaliana
  misc_feature: Public GI ID no.15226028
  misc_feature: Bit score of 347.4 for HMM based on sequences of FIGURE 4.
  misc_feature (66)..(330): Pfam Name: Sulfotransfer_1 Pfam Description: Sulfotransferase domain
  misc_feature: Functional Homolog Of Ceres SEEDLINE ID no. ME02549 at SEQ ID NO. 590
MDEKDRPKNLREEEEKPSEETKILISSLPWEIDYLGNKLFNYEGYWYSEDILQSIPNIHTGFQPQETDIILASFYKSGTTWLKALTFALVQRSKHSLEDHQHPLLHHNPHEIVPNLELDLYLKSSKPDLTKFLSSSSSSPRLFSTHMSLDPLQVPLKENLCKIVYVCRNVKDVMVSVWYFRQSKKITRAEDYSLEAIFESFCNGVTLHGPFWDHALSYWRGSLEDPKHFLFMRYEDLKAEPRTQVKRLAEFLDCPFTKEEEDSGSVDKILELCSLSNLRSVEINKTRTSSRVDFKSYFRKGQVGDWKSYMTPEMVDKIDMIIEEKLKGSGLKF

SEQ ID NO: 676 - protein, 346 aa, Oryza sativa subsp. japonica
  misc_feature: Public GI ID no.115459524
  misc_feature: Bit score of 550.5 for HMM based on sequences of FIGURE 4.
  misc_feature (74)..(339): Pfam Name: Sulfotransfer_1 Pfam Description: Sulfotransferase domain
  misc_feature: Functional Homolog Of Ceres SEEDLINE ID no. ME02549 at SEQ ID NO. 590
MSSSSVQTSPSPSHEVDAETDEELYKQFTDSVSSWPSSEPMPFLPLYRHDKGWYSSLMPMVGAMVADARFAARPSDIIVATLPKSGTTWIKALLYATVHRREHPADAAADHPFNSLGPHECVNFLEYQLYTNNRVPDLGRLPDPRLFATHVPFTSLPSAAAASGCKVVYVCRDPKDNLISMWDFANKFRAREGQEPMSPEAIAELFCLGVSPSGPYWDHVLGYWGAHVARPEQVLFFRYEEMKLDAAAHVRRLAEFVGLPFSAEEEEGGVVDAIVRLCSFDHMIGLEATKSGKTELVVGTAANSSFFRRGQVGDWANHLSPEIAQRIDAITEARFNGSGLRPSGTK

SEQ ID NO: 677 - DNA, 1214 bp, Gossypium hirsutum
  misc_feature: Ceres CLONE ID no.1793353
  misc_feature: Encodes the peptide sequence at SEQ ID NO 678
accaagccctccttgtaacatcgtatttgcactcattagtctgtccctcatggaatcccatcttgagaaacaaaatagagatgtgcttccaaaatctttcgaagagatgatatctactctccctaaagagaattgttggggttttcctgaagatcaatatcaatatcaaggtttttggttccccccgccttttctacaaggagcattgtcggctcaacaacaattccaggctcaacccactgatatcatcctttgtagctctccaagaacaggcacgacctggttaaaatccctcactttcgccactattacaagaacttcatacaatgattccaccacccctttactttccaagatgcctcatgatgttgtgcctttcatggagttcgatcatgcccagttttccactaatcgacatcttggaattcctcttttagccactcatcttccttattccttcttacccagatctacaattgattctggttgcaaacttatttacatttgcagggaccccaaagatacatttgtttcattttatcatttcattgcagggcactgcaaatcccaaaatactcaacccattcaacttgatgaagcgttcgaattgttttatgaaggtgtaagtctgtttgggccttattgggaccatgttttggggtactggaaagcaagtttggaacgtccagacaagttaatgttcttgaaatacgaagatttggttgaagatactgttttgtatcttaagaaaacagcagagtttatgggttatcctttctcgtcagaggaacaacaacaaggggtgcttgaaaacattgtgaagatgtgcagtttcgacaatttaagtggcttggaagtaaataaaaccgggagacatcgtgaagggaaaggaaatttggcgacggaaaataacattttcttccggaacgggaaggttggagactggaaggattatttgaccactgaaatggctcaacgtttagaccaacgaacactgcaaaagttgagcggttcaggtttaagtctgtaattgaaggttcaataatctatttatcggtttacccttttaatgtcgttttaattagagtttgtaattttaataatatcatatttaaaattttctgaaatattgtttattatatattttaaaaattaaaattttataaattgccattgaagtaaaaactaagcatataataaaaatttgtcttccc

SEQ ID NO: 678 - protein, 326 aa, Gossypium hirsutum
  misc_feature: Ceres CLONE ID no.1793353
  misc_feature: Bit score of 384.3 for HMM based on sequences of FIGURE 4.
  misc_feature (63)..(323): Pfam Name: Sulfotransfer_1 Pfam Description: Sulfotransferase domain
  misc_feature: Functional Homolog Of Ceres SEEDLINE ID no. ME02549 at SEQ ID NO. 590
MESHLEKQNRDVLPKSFEEMISTLPKENCWGFPEDQYQYQGFWFPPPFLQGALSAQQQFQAQPTDIILCSSPRTGTTWLKSLTFATITRTSYNDSTTPLLSKMPHDVVPFMEFDHAQFSTNRHLGIPLLATHLPYSFLPRSTIDSGCKLIYICRDPKDTFVSFYHFIAGHCKSQNTQPIQLDEAFELFYEGVSLFGPYWDHVLGYWKASLERPDKLMFLKYEDLVEDTVLYLKKTAEFMGYPFSSEEQQQGVLENIVKMCSFDNLSGLEVNKTGRHREGKGNLATENNIFFRNGKVGDWKDYLTTEMAQRLDQRTLQKLSGSGLSL

SEQ ID NO: 679 - DNA, 972 bp, Populus balsamifera subsp. trichocarpa
  misc_feature: Ceres ANNOT ID no.1467399
  misc_feature: Encodes the peptide sequence at SEQ ID NO 680
atgtctgatgcttcaaaaatcagtgaatctccaaacaccaagaacaaatatgaaaagataatctcaaatcttcgtcaagatgatggctggaaaccagttggaaaactttacgagtatcaaggcttttggtacggtccgtcgttggtacggaatgtaatttcagctcaggagtccttcactccccagccaactgatattgtcttgtgcagctctccaaaaagtggcacagcttggctcaaggcactggccttctccatcgtgtcacgaaatcaggtcaatgattccacaaaccctttgctcaaaaaactgcctcatgagattgtgccctttttggagattgaactggcccaagactcaaacaacagaaaccttgaaaccccatttgtggcaacacatattccttacagttccctgccaagatccataatagactcaagctgtaagatcatctacatatgcagggatcccaaggatgtcctaatttctcactggaattttgatcagcaagtgagtggcatcggctctgaatccttccctctggaagaggcattagagcaatattgtaaagggatctatcctttcggaccgtactgggaccatgttctagggttctggaaagcaagcttggaattcccggagaaagtactcttcgtcaagtatgaagatttgaagactgatgggccgttccatgtaaagagaatggccaagttcatgggccaccccttttccatcgaggaagagcaacaaggagctccagaaaaaattgtgagcatgtgtagtttcgagaatctgagccgtttggaggtgaacaagaatggaaaatactaccttcctgacctccctactttcgagaacaaatcctttttcaggaaaggtaaagcaggtgactggaaaaactatctgacagatggcaaggcagtaaaattcaaccaaattatggaagagaagttcagtggctccggcttggtctga

SEQ ID NO: 680 - protein, 323 aa, Populus balsamifera subsp. trichocarpa
  misc_feature: Ceres ANNOT ID no.1467399
  misc_feature: Bit score of 376.5 for HMM based on sequences of FIGURE 4.
  misc_feature (63)..(321): Pfam Name: Sulfotransfer_1 Pfam Description: Sulfotransferase domain
  misc_feature: Functional Homolog Of Ceres SEEDLINE ID no. ME02549 at SEQ ID NO. 590
MSDASKISESPNTKNKYEKIISNLRQDDGWKPVGKLYEYQGFWYGPSLVRNVISAQESFTPQPTDIVLCSSPKSGTAWLKALAFSIVSRNQVNDSTNPLLKKLPHEIVPFLEIELAQDSNNRNLETPFVATHIPYSSLPRSIIDSSCKIIYICRDPKDVLISHWNFDQQVSGIGSESFPLEEALEQYCKGIYPFGPYWDHVLGFWKASLEFPEKVLFVKYEDLKTDGPFHVKRMAKFMGHPFSIEEEQQGAPEKIVSMCSFENLSRLEVNKNGKYYLPDLPTFENKSFFRKGKAGDWKNYLTDGKAVKFNQIMEEKFSGSGLV

SEQ ID NO: 681 - DNA, 1342 bp, Zea mays
  misc_feature: Ceres CLONE ID no.264002
  misc_feature: Encodes the peptide sequence at SEQ ID NO 682
atatcttagttgcacggttaggtaagacatatggacacaggcagttgcgtctctgtctcttatatacatatgctagatttgctatattgagttgacatgccgttagttgcgatttgcgaagctagctcccaccatctgcgacgccatgtcttcttcctctgtccaacaaacggcctttcccgagcaagaagccgatgcggaaggcgaaacgaaccctgagctctaccagcatttcgccaacttggtctcctccctgccgagctccaaaggcttgtccaacaacaaattctaccgccacgaccaaggctggcactgcagcgtggtgggcatagtgggcgccatggtcgccgacgcgtgcttcagcgcgcgcccctcggacgtcatcgtcgccaccctgcccaagtccggcaccacgtggatgaagtcgctcctgtacgccaccgtgcaccggagagagcgtcccgtcgtcggcgccgccgccgaccagcatcctctcaacagctggggcccccacgaactcatcaagttcttcgagtaccagctctacacgcgggacagggtcccggacctggacaggctccccgaccctcggctcttcgcgacgcacgtccctttcgtgtcgctgccgagctccgtggtcgccacgccgggctgcaagatcgtctacgtgtgccgcgaccccaaggaccacctcgtctccctgtgggacttcgtcaacaaatacttcagggtcaaggatgggctcgagcctctctccgtggaggccgccgccgagctgttctgcgccggcctgaccccgttcgggccgtactgggaccacgtgctcggctactggcgcgcgcaccgcgcggaccccgacaaggtgctcttcttcaggtacgaggagatgcagagggaccccgcggcgcacgtccgcaggctggcggagttcgtcggcctcccattcagctccgaggaggaggacggcggcgtggtggatgccgtcgtggggctgtgctcgttcgagcgcatgaggggcatggcgccgaccaagggtggcaggactgagttcccgatcggcgtggtgcccaacagctccttcttccggcagggcgtggtgggggactgggtgaaccacctgtcaccggagatggcgcgccgcattgacgcgatcactgcagacaagttcaggggttcgagtctcgtcgtctagctagctgttacggatcaatcatcactcatcatcagtgcgccactctaccgtggtttctcaaatgctcaataatgcaaggactacctattagtattctatatctatactattctattaataagaacttatatatgttgctatcgcggctcc

SEQ ID NO: 682 - protein, 348 aa, Zea mays
  misc_feature: Ceres CLONE ID no.264002
  misc_feature: Bit score of 849.0 for HMM based on sequences of FIGURE 4.
  misc_feature (76)..(345): Pfam Name: Sulfotransfer_1 Pfam Description: Sulfotransferase domain
  misc_feature: Functional Homolog Of Ceres SEEDLINE ID no. ME02549 at SEQ ID NO. 590
MSSSSVQQTAFPEQEADAEGETNPELYQHFANLVSSLPSSKGLSNNKFYRHDQGWHCSVVGIVGAMVADACFSARPSDVIVATLPKSGTTWMKSLLYATVHRRERPVVGAAADQHPLNSWGPHELIKFFEYQLYTRDRVPDLDRLPDPRLFATHVPFVSLPSSVVATPGCKIVYVCRDPKDHLVSLWDFVNKYFRVKDGLEPLSVEAAAELFCAGLTPFGPYWDHVLGYWRAHRADPDKVLFFRYEEMQRDPAAHVRRLAEFVGLPFSSEEEDGGVVDAVVGLCSFERMRGMAPTKGGRTEFPIGVVPNSSFFRQGVVGDWVNHLSPEMARRIDAITADKFRGSSLVV

SEQ ID NO: 683 - DNA, 1263 bp, Gossypium hirsutum
  misc_feature: Ceres CLONE ID no.1982930
  misc_feature: Encodes the peptide sequence at SEQ ID NO 684
acaaagcaacccttgaaatatagtatttgcactcattagcctgtccctcatggaatcccatcttgagaaacaaaatggagatgtgcttcaacaatctttcaaagagatgatatctactctccctaaagagaatcgttggggttttcttgaagattattatcaatatcaaggtttttggatctccccgtcttttctacaaggagcgttgtcagctcaacaacaattccaagctcaacccactgatgtcatcctttgtagctctctaagaacaggcacaggctggttaaaatccctcactttcgccactattacaagaacttcatacaatgattccaccacccctttacttcacacgctgcctcatgatgttgtgcctttcttggagttcgatcattcccagttttctgctaatctacatcttggaattcctcttttagccactcatcttccttattccttcttacccagatctataattgattctggttgtaaaattatttacatttgcagggaccccaaagatacatttgtttcattgtatcatttcattgcagggcactgcaaatccaaaaatgctcaacccattcaacttgatgaagcgttcgaattgttttatgaaggtgtaagtccgttcggcccttattgggaccatgttttggggtactggaaagcaagtttggaacatccagacaagttaatgttcttgaaatatgaagaactggttgaagatactgttttgtatcttaagaaaattgcagagtttatgggttatcctttctcgtcagaggaacaacaacaaggggtgcctgaaaacattgtacagctgtgcagtttcgacaatttaagtggcttggaagtaaataaaaccgggaaacactgtgaagggcaaggaaatttggagatggaaaataacattttctttcggaaagggaaggttggagactggaagaattatttgaccactgaaatggctcaacgttttgaccaacgaacaatgcaaaagttgagcggttcaggtttaagtctctaattgaagatctataatctatttattgcttaaacctgatcagagttcgtaattatctcttttaataatattactttcaaataagatcatcttggccgagatttataattagtaccagtagtctcatataaatctattgtactattttttgaattttggagctcgttgatggaacttcaataattaaataacttaaataaaagctaagcatagtataaaaaaaaaaaaaaaaaaaa

SEQ ID NO: 684 - protein, 326 aa, Gossypium hirsutum
  misc_feature: Ceres CLONE ID no.1982930
  misc_feature: Bit score of 397.2 for HMM based on sequences of FIGURE 4.
  misc_feature (63)..(323): Pfam Name: Sulfotransfer_1 Pfam Description: Sulfotransferase domain
  misc_feature: Functional Homolog Of Ceres SEEDLINE ID no. ME02549 at SEQ ID NO. 590
MESHLEKQNGDVLQQSFKEMISTLPKENRWGFLEDYYQYQGFWISPSFLQGALSAQQQFQAQPTDVILCSSLRTGTGWLKSLTFATITRTSYNDSTTPLLHTLPHDVVPFLEFDHSQFSANLHLGIPLLATHLPYSFLPRSIIDSGCKIIYICRDPKDTFVSLYHFIAGHCKSKNAQPIQLDEAFELFYEGVSPFGPYWDHVLGYWKASLEHPDKLMFLKYEELVEDTVLYLKKIAEFMGYPFSSEEQQQGVPENIVQLCSFDNLSGLEVNKTGKHCEGQGNLEMENNIFFRKGKVGDWKNYLTTEMAQRFDQRTMQKLSGSGLSL

SEQ ID NO: 685 - protein, 358 aa, Oryza sativa subsp. indica
  misc_feature: Public GI ID no.125540700
  misc_feature: Bit score of 406.1 for HMM based on sequences of FIGURE 4.
  misc_feature (81)..(349): Pfam Name: Sulfotransfer_1 Pfam Description: Sulfotransferase domain
  misc_feature: Functional Homolog Of Ceres SEEDLINE ID no. ME02549 at SEQ ID NO. 590
MATAGVTEHLLSPRAGAGDDMSAGDGEGWCNALAKYEALASSLPSCHGLGSAPYRRYGGFWYPAHLMPATLAARDTFVARPSDVILATMPKSGSTWLKALAFCVVHRGRHTPAAGQHPLLHSSPHDLVPFLHSIYEISRSCRVAPGHRLDAMPSPRILAVHEPLSSLPASVKASGCRVVYLCRDPKDAFVSLRHYLDEIKPEGSTMTPFDEAFELLCDGVSPYGPMWDHAAEYWKESLARPEEVVFLRYESLKEDGVGSVRRLAGFLGCPFTGEELAGGVPETIVELCSMERMRNVEANRDGEHGATWSSFKNSAFFRKGEVGDWKKHMSPEMARRLDDVVEEKLRGSGMSLIRHRQY

SEQ ID NO: 686 - DNA, 1044 bp, Populus balsamifera subsp. trichocarpa
  misc_feature: Ceres ANNOT ID no.1448743
  misc_feature: Encodes the peptide sequence at SEQ ID NO 687
atgtcttactctcctaatcttcaaaaagcttcaaacagtactaaccactacgaagaagatcaacaacaacaacaacagatcaaaagccagtcccagaaatatgaagagattatttcaacccttcctaaggatcaatatggatggttggatgagcattacaagattgaaggattttggtatgatcctgtttgggctgttggagttctttgggcacaggaaaacttccaggcacgctctagtgatattattttggcttcatttcccaagtgtggcaccacatggctgaaggctctcatgtttgccatccagaagagaaatgatcgttgcctcaatgattcaactcaccctttactcactacaaacccccataagtgtgttccctattttgagctgcaagctcatgaagatgacccatttacatacctagattctcttccctcacctaggctacttggcacacatatctcttacacttcactgccgaaatccatcataaattcaggttctaagattgtgtgtatctgtcgggactcgaaagatgttttggcctccttgtggaagtttgtcaataaaataagatctggaaggaacatgctacccctgcctctggaagaagggtttgagcttttctgtaaaggagtttgtctttcaggacccttttgggagtacaattcggagtactggaacgcaagtttagaacgtccgaataatgtattttttctcaagtatgaggatctgaagaaggatactgctttttacgtgcagaagctggcacgattcatggaatgtcccttctcggtggatgaaaaaagtaaaggtgtcgtgaaagacataataaagctatgtagtcttgagaatttgagcaatctggaggtgaataaagctggaacatttcatctgggctccaaagcgaaggtggacaacaatgcattcttccggcgaggtaacgttggagattcgaagacttgtctgacgcctacgatgatcaagcgacttgatgagattacaaaggcaaagttcaaagggtctggactggcaatttag

SEQ ID NO: 687 - protein, 347 aa, Populus balsamifera subsp. trichocarpa
  misc_feature: Ceres ANNOT ID no.1448743
  misc_feature: Bit score of 408.7 for HMM based on sequences of FIGURE 4.
  misc_feature (79)..(344): Pfam Name: Sulfotransfer_1 Pfam Description: Sulfotransferase domain
  misc_feature: Functional Homolog Of Ceres SEEDLINE ID no. ME02549 at SEQ ID NO. 590
MSYSPNLQKASNSTNHYEEDQQQQQQIKSQSQKYEEIISTLPKDQYGWLDEHYKIEGFWYDPVWAVGVLWAQENFQARSSDIILASFPKCGTTWLKALMFAIQKRNDRCLNDSTHPLLTTNPHKCVPYFELQAHEDDPFTYLDSLPSPRLLGTHISYTSLPKSIINSGSKIVCICRDSKDVLASLWKFVNKIRSGRNMLPLPLEEGFELFCKGVCLSGPFWEYNSEYWNASLERPNNVFFLKYEDLKKDTAFYVQKLARFMECPFSVDEKSKGVVKDIIKLCSLENLSNLEVNKAGTFHLGSKAKVDNNAFFRRGNVGDSKTCLTPTMIKRLDEITKAKFKGSGLAI

SEQ ID NO: 688 - protein, 358 aa, Oryza sativa subsp. japonica
  misc_feature: Public GI ID no.50251910
  misc_feature: Bit score of 399.4 for HMM based on sequences of FIGURE 4.
  misc_feature (81)..(349): Pfam Name: Sulfotransfer_1 Pfam Description: Sulfotransferase domain
  misc_feature: Functional Homolog Of Ceres SEEDLINE ID no. ME02549 at SEQ ID NO. 590
MATAGVTEHLLSPRAGAGDDMSAGDGEGWCNALAKYEALASSLPSCHGLGSAPYRRYGGFWYPAHLMPATLAARDTFVARPSDVILATMPKSGSTWLKALAFCVVHRGRHAPAAGQHPLLHSSPHDLVPFLHSIYEISRSCRVAPGHRLDAMPSPRILAVHEPLSSLPASVKASGCRVVYLCRDPKDAFVSLRHYLDEIKPEGSTMTPFDEAFELLCDGVSPYGPMWDHAAEYWKESLARPEEVVFLRYESLKEDGVGSVRRLAGFLGCPFTGEELAGGVPETIVELCSMERMRNVEANRDGEHGATWSSFKNSAFFRKGEVGDWKEHMSPEMARRLDDVVEEKLRGSRMSLIRHRQY

SEQ ID NO: 689 - DNA, 1257 bp, Gossypium hirsutum
  misc_feature: Ceres CLONE ID no.1836748
  misc_feature: Encodes the peptide sequence at SEQ ID NO 690
cgacacagccatccttgtataatatagtatttgcactcattagcctgtctctcatggaatcccatattgagaaacaaaatagagatgtgcttcaaaaatctttcaaagagatgatatctactctccctaaagagaattgttggggtattcctgaagctctatatcaatatcagggtttttggctcacccccccttttctacaaggagcattgtcggctcaacaacaattccaggctcaacccactgatatcatcctttgtagctctccaagaacaggtgcagcctggttaaaatccctcactttcgccactattacaagaacttcatacaatgattccaccacccctttactttccaagatgcctcatgatgttgtgcctttcatggagttcgatcatgcccagttttccactaatcgacatcttggaattcctcttttagccactcatcttccttattccttcttacccagatctataattgattctggttgtaaacttatttacatttgcagggaccccaaagatacatttgtttcattgcatcatttcaatgcaaggtacaacaaatcccaaaatactcaacccgttcaacttgatgaagcgttcgaattgttttatgaaggtgtaaattggtatgggccttattgggaccatgttctggggtactggaaagcaagtttggaacatccagacaagttactattcttgaaatatgaagaactgattgaagatactgttttgtatcttaagaaaatagcagaatttatgggttatcctttctcgtcagaggaacaacaacaagcggtgcctgaaaacattgtacagctgtgcagtttcgagaatttaaatggcttggaagtaaataaaactgggaaacatcgtggcgggcaaggagatttggcgatggaaaataacattttcttccggaaagggaaggttggagactggaagaattatttgacaactgaaatggctcgacgtttagaccaacgaacactgcaaaagtttcgcggttcaggtttaagtgtctaactgaaggtccacaatctatttatcagagatcagaattggtaattatgccttttaataatattatcttcaaataaggtcatcttgatcaagatttgtaattatcccatttagtaatattgatggggattgatttattgtactattcctccgatctttagttggagctcgttagtagaatcttatcagttaaatgattatttctcaaaaaaaaaaaaaaaaaaaa

SEQ ID NO: 690 - protein, 326 aa, Gossypium hirsutum
  misc_feature: Ceres CLONE ID no.1836748
  misc_feature: Bit score of 389.3 for HMM based on sequences of FIGURE 4.
  misc_feature (63)..(323): Pfam Name: Sulfotransfer_1 Pfam Description: Sulfotransferase domain
  misc_feature: Functional Homolog Of Ceres SEEDLINE ID no. ME02549 at SEQ ID NO. 590
MESHIEKQNRDVLQKSFKEMISTLPKENCWGIPEALYQYQGFWLTPPFLQGALSAQQQFQAQPTDIILCSSPRTGAAWLKSLTFATITRTSYNDSTTPLLSKMPHDVVPFMEFDHAQFSTNRHLGIPLLATHLPYSFLPRSIIDSGCKLIYICRDPKDTFVSLHHFNARYNKSQNTQPVQLDEAFELFYEGVNWYGPYWDHVLGYWKASLEHPDKLLFLKYEELIEDTVLYLKKIAEFMGYPFSSEEQQQAVPENIVQLCSFENLNGLEVNKTGKHRGGQGDLAMENNIFFRKGKVGDWKNYLTTEMARRLDQRTLQKFRGSGLSV

SEQ ID NO: 691 - protein, 324 aa, Brassica napus
  misc_feature: Public GI ID no.3420006
  misc_feature: Bit score of 322.1 for HMM based on sequences of FIGURE 4.
  misc_feature (65)..(319): Pfam Name: Sulfotransfer_1 Pfam Description: Sulfotransferase domain
  misc_feature: Functional Homolog Of Ceres SEEDLINE ID no. ME02549 at SEQ ID NO. 590
MSSSSSVPDYLRDENLTQKTKDLISSLPSEKGWLVCQMYQFQGRWHTQALLQGILTCQKHFEAKDSDIILVTNPKSGTTWLKALVFALINRHKFPVYSVIILSCYQSALLVPFLGRSLLRSPDFDFSQLSSPRLMNTHISHLSLPESVKSSSCKIVYCCRNPKDMFVSLWHFGKKLAPEETADYPIEKAVEAFCQGKFIGGPFWDHVLEYWYASLENPNKVLFVSYEEPKKKTGETIKRIAEFLGCGLVGEEEVRAIVKLCSFESLSSLEVNREGKLPSGMETRAFFRKGEVGGWRDTLTESLAEVIDRTIEEKFQGSGLKFSC

SEQ ID NO: 692 - protein, 270 aa, Medicago truncatula
  misc_feature: Public GI ID no.92879376
  misc_feature: Bit score of 370.5 for HMM based on sequences of FIGURE 4.
  misc_feature (14)..(261): Pfam Name: Sulfotransfer_1 Pfam Description: Sulfotransferase domain
  misc_feature: Functional Homolog Of Ceres SEEDLINE ID no. ME02549 at SEQ ID NO. 590
MASREEDHKAPLGLKALTYAIVNRHSLEMHDHPLLKSNSHELVPYFEFNIYGDNLDQTPLIDLSNMAEPRLFGTHIPFNSLAKSIKESNCKIIYICRNPLDTFISTWFFINKIRSNESLPMLNLEEAFEMYCKGRNLSGPFWNHMLGYYKESIARPGKVLFLNYEELKQDANYQVKRIAEFLGCPFTQEEESNRMIQNIINLCCFENMKDQEVNKFGVLSSRYEKKHLFRKAEIGDWKNYLSRSMVEKISKITKEMLGGLSFEVCRSIDQ

SEQ ID NO: 693 - DNA, 1180 bp, Triticum aestivum
  misc_feature: Ceres CLONE ID no.838941
  misc_feature: Encodes the peptide sequence at SEQ ID NO 694
gccgtgacattcctccactctcgatcgccggctcgtccagttgccgcctccaaagagaagccatgaatgctgctctcaccgtcgccgtagccggggaagaaatcgacgaggccgtagccggggaagaaatcgacgaggccgcctctcgggctcaggctgacatgtcggagatcatgtcgtcgctcccacggtgcccggtgtaccttactcgccactaccgcggcttctggatccgcgagttcgtcctcaagggcatggccgccgctcaggcatccttcgagccaaggccaaccgacgtcttcctcgccagctgccccaagtccggcaccacctggctcaaggcgctcgcctttgcgacgctcaaccgcgccacgcacttgccgtccgactccaaccacccgctatgccaccgcaacccgcacgactgcgtcgccttcctccagaccaggcccgtgcctgagaccatggcgctcccttctccccggctgctcgcaacccacatcccctgctccctcctgcccagccgcataacggaatgcggccgggtcgtctacgtgtgccgggagccaaaggacgctctggtctccttctggatctacaacaacaagatcgcgccgatgctgcgccggaagttcggcctggagtctccctcgcccacgttcgaggaggcgttcgagctcttctgcgaggggcagagcagctccggaccgccatggcgccacgccctcgagtactgggaggagagccggaggaggcctgggaaggtgctcttcctcaggtacgaggacatgctgcaagaccccacaggcaacgccaacaatctcgctgcgttcatggggtgcccgttttcttgcgcagaggaggaggcaggggtggtgcaggagatcgtgcagctctgtagctttgagaaactcaagagctcggaggtgaacaagaatggcagcagcgccatgatgggcgtcaacaacgacgtatacttcaggaagggagcggtcggcgactggaaaaactacatgacgccggagatggcggcgcggctggacaagatcgtcgaggaggcgcttcaaggttcaggcctgacctttggcatctccatgtagaagggatggggagcgaattgttgctatgaagcataaattttcgtatttgacaatcccaaagaaaataaggtcttatgatc

SEQ ID NO: 694 - protein, 345 aa, Triticum aestivum
  misc_feature: Ceres CLONE ID no.838941
  misc_feature: Bit score of 390.1 for HMM based on sequences of FIGURE 4.
  misc_feature (76)..(338): Pfam Name: Sulfotransfer_1 Pfam Description: Sulfotransferase domain
  misc_feature: Functional Homolog Of Ceres SEEDLINE ID no. ME02549 at SEQ ID NO. 590
MNAALTVAVAGEEIDEAVAGEEIDEAASRAQADMSEIMSSLPRCPVYLTRHYRGFWIREFVLKGMAAAQASFEPRPTDVFLASCPKSGTTWLKALAFATLNRATHLPSDSNHPLCHRNPHDCVAFLQTRPVPETMALPSPRLLATHIPCSLLPSRITECGRVVYVCREPKDALVSFWIYNNKIAPMLRRKFGLESPSPTFEEAFELFCEGQSSSGPPWRHALEYWEESRRRPGKVLFLRYEDMLQDPTGNANNLAAFMGCPFSCAEEEAGVVQEIVQLCSFEKLKSSEVNKNGSSAMMGVNNDVYFRKGAVGDWKNYMTPEMAARLDKIVEEALQGSGLTFGISM

SEQ ID NO: 695 - DNA, 1017 bp, Populus balsamifera subsp. trichocarpa
  misc_feature: Ceres ANNOT ID no.1437746
  misc_feature: Encodes the peptide sequence at SEQ ID NO 696
atggagacagccaatgaagatagtttccaagaatttgtactcaaccttcctcgtgggaaagactgggatggcgctcccctccttctttacaatgatacgtggtatccagcctactgcattagaggtgtggtttcctttcaacaaaacttcagggcacaagccaccgacataatagtagcaagcttgccaaagtcagctactacttggttgaaggcactcaccttctcggttgtaaaccgagatcgctacagtcccaaagagagtcccctgaccaccaccccacctcgtgaactgatgcccttctttgagaatgatctttacttgaaaagcccgaacccagatcttgattttcctcctccaagaatccttgcttgtcacacacattacacgtctctgccacagtccatcagagattccaactgtaaaattgtgtacatatgtaggaatcctttggaccaggctgtctcttattttcatttccttcgaaacatagtgtcaggcagcacaaaaccgttatcatcaattgatgaatgtttcgagaacatatgtcgcggtgttcagagtcacggacccttttggaatagtatgttgagctattggaaagcaagcttggaaagaccagacaaggtgttgtttttgaagtatgaggagctgaaagaggatattatcttgaacttgaagagttttgacaatctcaaggatttggaagtgaaccgaaatggtgtccattcttcaggattttcaaatagtgccttcttcaggaaaggagaggtgggagattggggcaatcatctcactccttccatggctgaacgtttctggaagatcgtggaagaaaagttggatggatctggtttaaccttcaaattatctcaatggattaacggatttgacagacaggcgctttctttcaagaaaggtcactggatagcaactcatcctgaaccgtacgtagtagctgcttccggtggggatatcttccaagaaatccaccccggccctgattttctcctctga

SEQ ID NO: 696 - protein, 338 aa, Populus balsamifera subsp. trichocarpa
  misc_feature: Ceres ANNOT ID no.1437746
  misc_feature: Bit score of 340.7 for HMM based on sequences of FIGURE 4.
  misc_feature (54)..(285): Pfam Name: Sulfotransfer_1 Pfam Description: Sulfotransferase domain
  misc_feature: Functional Homolog Of Ceres SEEDLINE ID no. ME02549 at SEQ ID NO. 590
METANEDSFQEFVLNLPRGKDWDGAPLLLYNDTWYPAYCIRGVVSFQQNFRAQATDIIVASLPKSATTWLKALTFSVVNRDRYSPKESPLTTTPPRELMPFFENDLYLKSPNPDLDFPPPRILACHTHYTSLPQSIRDSNCKIVYICRNPLDQAVSYFHFLRNIVSGSTKPLSSIDECFENICRGVQSHGPFWNSMLSYWKASLERPDKVLFLKYEELKEDIILNLKSFDNLKDLEVNRNGVHSSGFSNSAFFRKGEVGDWGNHLTPSMAERFWKIVEEKLDGSGLTFKLSQWINGFDRQALSFKKGHWIATHPEPYVVAASGGDIFQEIHPGPDFLL

SEQ ID NO: 697 - DNA, 990 bp, Sorghum bicolor
  misc_feature: Ceres ANNOT ID no.6017241
  misc_feature: Encodes the peptide sequence at SEQ ID NO 698
atggaacaagccaaggagggaagcgccacagatagctcgtccgaagccatttcatctcaaagccacagtacccatcttctctccaaacttccaacaagagagggttggacacagccactggtgctctacaagaacttctggatccgtccgccaatggctattaacatcatgcacctccagaacagttttaaagctcgccaagacgatatcatcattgcatccaaccctaagtgtggcaccacatggttgaaggcgctcgccttcacaataaccaatcgctccaggtatgagtttggaaatcaccctcttctctttcgtcatccccaggaggtgattccatttatcgagatccctcttggcgtggagctgacttatgtggacacgctctcttccccaagagttctcgccacccatatgcccttttcattgctcccaaactccataactacttgtggttgtcggattgtgtacatctgccgagggccaaaggatgcctttgtgtctcgatggcattttgagaataagattagtagagaatatagcatcaatgtggaagatgctcttgacatgttctgtgaaggtttctcaccctatggtcctttttgggagcactgcctcgagtactggagggagagcatcgcaagtcctgacaaggttctttttctcaagtatgaggatatgacatcagaaccagtgaagtatgtcaaaaggatcgcatcgttccttggcgtcccattcagtattaaggaacaagaagatggggtgcctgaggaggttgtgagattatgcagcttcgagaagctcagcggcttgcatgccaatcaggcagcaggagacatcgctcggcatggcaacatggtcattgacaagtcggtgttctttagaaaaggaatcgtgggggattgggtgaatcacattagtgaagagatggggagaaagatagattccgttatagaagagaaactcaagggatctggccttgtgttttaa

SEQ ID NO: 698 - protein, 329 aa, Sorghum bicolor
  misc_feature: Ceres ANNOT ID no.6017241
  misc_feature: Bit score of 430.0 for HMM based on sequences of FIGURE 4.
  misc_feature (67)..(326): Pfam Name: Sulfotransfer_1 Pfam Description: Sulfotransferase domain
  misc_feature: Functional Homolog Of Ceres SEEDLINE ID no. ME02549 at SEQ ID NO. 590
MEQAKEGSATDSSSEAISSQSHSTHLLSKLPTREGWTQPLVLYKNFWIRPPMAINIMHLQNSFKARQDDIIIASNPKCGTTWLKALAFTITNRSRYEFGNHPLLFRHPQEVIPFIEIPLGVELTYVDTLSSPRVLATHMPFSLLPNSITTCGCRIVYICRGPKDAFVSRWHFENKISREYSINVEDALDMFCEGFSPYGPFWEHCLEYWRESIASPDKVLFLKYEDMTSEPVKYVKRIASFLGVPFSIKEQEDGVPEEVVRLCSFEKLSGLHANQAAGDIARHGNMVIDKSVFFRKGIVGDWVNHISEEMGRKIDSVIEEKLKGSGLVF

SEQ ID NO: 699 - DNA, 993 bp, Sorghum bicolor
  misc_feature: Ceres ANNOT ID no.6085947
  misc_feature: Encodes the peptide sequence at SEQ ID NO 700
atggatgcgcaacgccttctccagtatgaggaattggcgtcgtccctccctgcatcccagaagggtatcgggagctccccgtaccggaagcacgaaggcttctggtacccggagcaccagctggcgccgacgctggcgatgcgggacacgttcgtcgcccgcccgaccgacatcatcctcgccaccattcccaagtccggcacgacgtggcttaaggccctcgtctactgtgtcgtccaccgcggccaccacgcgccggccgacgagcgccacccactcctcgtctccagcccgcacgacgtggtcccgttcctgcactccatctacgagaaccaccgctccgcgtcgcccgtcccggtcctcgaagagatgccgtcgccgcgtgtcctggccgtgcacgcgccgttcacggccctgccgccatcggtgcgggagtccgcgtgccgcgtcgtctatctgtgccgagaccccaaggacacttttgtctcgctccgtcactacgtcgacaagatcaagcccgagggatccgccatgacgccgttcgccgaggcgttcgacctgttctgcgacggcgtgtcaccgtttgggccggtctgggacaacatggccgagtactggaagaagagcatggcgcggccggaggaggtggtgttcctccggtacgaggacctgaaggaggacactgtggggaacgtgaggcgcctagcggcgttcctcggctgcccattcaccgacgaggaggcagagagaggcgtccctgaggcgattgtgacgctgtgcagtatggacaagatgaggagcgtcaaggccaaccgggatgggatgcactggaacggccgttcacgattcaagaactcggccttctttcgaaagggggaggtcggtgactggaaggcgcacatgacgctggatatggcgaggagactggatgacatcgtggaggaaaaactgcgaggaataggatctgggctctccatgatcggccagccatga

SEQ ID NO: 700 - protein, 330 aa, Sorghum bicolor
  misc_feature: Ceres ANNOT ID no.6085947
  misc_feature: Bit score of 394.2 for HMM based on sequences of FIGURE 4.
  misc_feature (55)..(321): Pfam Name: Sulfotransfer_1 Pfam Description: Sulfotransferase domain
  misc_feature: Functional Homolog Of Ceres SEEDLINE ID no. ME02549 at SEQ ID NO. 590
MDAQRLLQYEELASSLPASQKGIGSSPYRKHEGFWYPEHQLAPTLAMRDTFVARPTDIILATIPKSGTTWLKALVYCVVHRGHHAPADERHPLLVSSPHDVVPFLHSIYENHRSASPVPVLEEMPSPRVLAVHAPFTALPPSVRESACRVVYLCRDPKDTFVSLRHYVDKIKPEGSAMTPFAEAFDLFCDGVSPFGPVWDNMAEYWKKSMARPEEVVFLRYEDLKEDTVGNVRRLAAFLGCPFTDEEAERGVPEAIVTLCSMDKMRSVKANRDGMHWNGRSRFKNSAFFRKGEVGDWKAHMTLDMARRLDDIVEEKLRGIGSGLSMIGQP

SEQ ID NO: 701 - DNA, 1005 bp, Sorghum bicolor
  misc_feature: Ceres ANNOT ID no.6017242
  misc_feature: Encodes the peptide sequence at SEQ ID NO 702
atggcgcaagttcactctgaaatcaaagagagctccactaatgaaagtagcaacagtgaagctgatcttgtagctagacttcccacaagggaaggatgggcgacacctctcaccctctacaaccagtgctggctgagatcacacacggtaggaaaattcatggccgtgagagacaacttcaagccccgcggcgacgacatcatcctggcgacgcaccccaagagcggaaccaactggctcaaggccctcgccttcaccatcttcaaccgctcccgctgcagcctcgacaacaaccatcagcagcaccctctgctcacgaccaccccacagatggccgtgcccttcatcggcttcagctccacgggtggtggcgacctcgaccacctggagacgctgccgtcgccgaggctgctgtcgacccaccttcccctctcgctgctcccgcccgccgtctccaccctcggctgcagggtggtgtacctctgccgggagcccaaggatgccttcgtctcgaggtggcactttgagaacatgatcggcacaggggcccccgtcggcctcgacgctgccttcgccatgttctgcgagggctgctctcctttcggccctttctgggagcactaccttgagtactggaatgagagctcggcgaggccacgagaggtgatgtttctcaggtacgaacagatggcgtctgacacgctccaggttgccaggaagcttgcgaccttcctcggtgtccccttcactcaggaggaggacgaccgtggagttgcccagcaggttgtcagcttctgcagcttcgactcgcttcgcagctttcaagctaataaagcatcgccagatggtgttgaggtggcagggggcaagcttttcttccagcgctcttccgtgtttaggaaaggcaaggtcggggactggaccaaccacatgagcaaagagatgggacaagaattggatcgcctcgtggaggacaacttcaaaggatctggtctggtgttctga

SEQ ID NO: 702 - protein, 334 aa, Sorghum bicolor
  misc_feature: Ceres ANNOT ID no.6017242
  misc_feature: Bit score of 328.9 for HMM based on sequences of FIGURE 4.
  misc_feature (64)..(331): Pfam Name: Sulfotransfer_1 Pfam Description: Sulfotransferase domain
  misc_feature: Functional Homolog Of Ceres SEEDLINE ID no. ME02549 at SEQ ID NO. 590
MAQVHSEIKESSTNESSNSEADLVARLPTREGWATPLTLYNQCWLRSHTVGKFMAVRDNFKPRGDDIILATHPKSGTNWLKALAFTIFNRSRCSLDNNHQQHPLLTTTPQMAVPFIGFSSTGGGDLDHLETLPSPRLLSTHLPLSLLPPAVSTLGCRVVYLCREPKDAFVSRWHFENMIGTGAPVGLDAAFAMFCEGCSPFGPFWEHYLEYWNESSARPREVMFLRYEQMASDTLQVARKLATFLGVPFTQEEDDRGVAQQVVSFCSFDSLRSFQANKASPDGVEVAGGKLFFQRSSVFRKGKVGDWTNHMSKEMGQELDRLVEDNFKGSGLVF

SEQ ID NO: 703 - DNA, 406 bp, Arabidopsis thaliana
  misc_feature: Ceres SEEDLINE ID no.ME02865
  misc_feature: Expected Sequence
  misc_feature: Encodes the peptide sequence at SEQ ID NO. 705
  misc_feature (31)..(31): n is a, c, t, g, unknown, or other
atctatattttctaaggaaaaaacttcatcnaaaaaaaagaaaagaaagaagataaatggcgtctaacaaagtctcattcttcttggttctttgcctttgtgttctctcaacagcagagtttggagaagcacaaattctaacaggaataaaatgcccagatccaaacggctacgacaaagaagataaatgtaatatttactgcaaggatcaaaattatatgggtggttcttgtcaaggttacaaaaatcattatatgtgtgaatgctatgtaggataaaaatacatctcatggttgaatttctgctactcacagttaaacatgtatctcttgtcaatttcttatcatatatagtgggatttatgaaataatgtggaacacaaaaacctataaatgtaagggttatc

SEQ ID NO: 704 - DNA, 406 bp, Arabidopsis thaliana
  misc_feature: Ceres SEEDLINE ID no.ME02865
  misc_feature: Inplanta Sequence
  misc_feature: Encodes the peptide sequence at SEQ ID NO. 705
atctatattttctaaggaaaaaacttcatcaaaaaaaaagaaaagaaagaagataaatggcgtctaacaaagtctcattcttcttggttctttgcctttgtgttctctcaacagcagagtttggagaagcacaaattctaacaggaataaaatgcccagatccaaacggctacgacaaagaagataaatgtaatatttactgcaaggatcaaaattatatgggtggttcttgtcaaggttacaaaaatcattatatgtgtgaatgctatgtaggataaaaatacatctcatggttgaatttctgctactcacagttaaacatgtatctcttgtcaatttcttatcatatatagtgggatttatgaaataatgtggaacacaaaaacctataaatgtaagggttatc

SEQ ID NO: 705 - protein, 73 aa, Arabidopsis thaliana
  misc_feature: Ceres SEEDLINE ID no.ME02865
  misc_feature: Bit score of 216.6 for HMM based on sequences of FIGURE 5.
MASNKVSFFLVLCLCVLSTAEFGEAQILTGIKCPDPNGHDKEDKCNIYCLNQNYMGGSCQGYKNHYMCECYVG

SEQ ID NO: 706 - protein, 73 aa, Arabidopsis thaliana
  misc_feature: Public GI ID no.79320952
  misc_feature: Bit score of 212.8 for HMM based on sequences of FIGURE 5.
  misc_feature: Functional Homolog Of Ceres SEEDLINE ID no. ME02865 at SEQ ID NO. 705
MASNKVSFIFILFLCVLSTAEFGEAQNPRGRKCEDPNGVDQKAKCYIYCNEQGFLGGSCQGYTNHYMCECYVG

SEQ ID NO: 707 - protein, 74 aa, Arabidopsis thaliana
  misc_feature: Public GI ID no.79320957
  misc_feature: Bit score of 206.1 for HMM based on sequences of FIGURE 5.
  misc_feature: Functional Homolog Of Ceres SEEDLINE ID no. ME02865 at SEQ ID NO. 705
MASNKVSFFLVLCLCILLAGECIESPIFTGNKCSDPTGMDKDGKCLDYCHAQGYPGGSCIGFIDQGYMCVCKVG

SEQ ID NO: 708 - protein, 315 aa, Arabidopsis thaliana
  misc_feature: Public GI ID no.6692094
  misc_feature: Bit score of 58.2 for HMM based on sequences of FIGURE 5.
  misc_feature: Functional Homolog Of Ceres SEEDLINE ID no. ME02865 at SEQ ID NO. 705
MNDADASIQIQQMVRFIRQEAEEKANEISISSEEEFNIEKLQLVEAEKKKIRQEYEKKEKQVDVRKKIDYSMQLNASRIKVLQAQDDIVNAMKEEAAKQLLKVSQHGFFNHHHHQYKHLLKDLIVQCLLRLKEPAVLLRCREEDLDIVESMLDDASEEYCKKAKVHAPEIIVDKDIFLPPAPSDDDPHALSCAGGVVLASRDGKIVCENTLDARLEVAFRNKLPEFCSKGSFLEMCVDPKVALRQGWCSLMSDSNFITKEKLRDAKSMNPTGRRCPDPNGVEKKSMCYSSCKTQGFMGGSCQGHKGNYMCECYEG

SEQ ID NO: 709 - protein, 72 aa, Arabidopsis thaliana
  misc_feature: Public GI ID no.145323049
  misc_feature: Bit score of 107.9 for HMM based on sequences of FIGURE 5.
  misc_feature: Functional Homolog Of Ceres SEEDLINE ID no. ME02865 at SEQ ID NO. 705
MASNKISFSFVLCLYMCSLLDAKSMNPTGRRCPDPNGVEKKSMCYSSCKTQGFMGGSCQGHKGNYMCECYEG

SEQ ID NO: 710 - DNA, 716 bp, Arabidopsis thaliana
  misc_feature: Ceres SEEDLINE ID no.ME03227
  misc_feature: Encodes the peptide sequence at SEQ ID NO. 711
aaacaacgtttcgtcttctcagattctttacctttcttaaggaaaaaccccaaaagagagaagataaaaatctcgcattcagattttagggtttctgacaaattctccgacgaaattcaagatccgaatctcggcaatgtcgacaatctcgccgtcattagccgtaattgcgtttctttttctgattcttctgaatctatcttcggttttcgctgatccttcgacggaaggaggagagattattaggttaccttcggagaagatcaacggtgaaaaaaacagaggcgaattctgtgaaggaattgctaaaccggcttcgtgtccggttcagtgtttcaggcctgatccggtttgcggtgaagacagcgttacttactggtgcggttgtgcagatgctttgtgccatggtgttcgtgttgtgaaacaaggagcttgtgatgttggtaatggtgttggtttgtctgttcctggacaagctctgcttttgatacacattgtctggatgatgcttcttgggttttctattctctttgggctcttttgattttggttctaatttctctgaatcaaaacaacatatagaagattgtttaggttttcagattgcaaatgacgaatcttttttgtttatactcttctttttttctttatattgctctgtattcatattacattaaaactatgaggaaatattattattatttggtttgttgcgc

SEQ ID NO: 711 - protein, 135 aa, Arabidopsis thaliana
  misc_feature: Ceres SEEDLINE ID no.ME03227
  misc_feature: Bit score of 342.0 for HMM based on sequences of FIGURE 6.
MSTISPSLAVIAFLFLILLNLSSVFADPSTEGGEIIRLPSEKINGEKNRGEFCEGIAKPASCPVQCFRPDPVCGEDSVTYWCGCADALCHGVRVVKQGACDVGNGVGLSVPGQALLLIHIVWMMLLGFSILFGLF

SEQ ID NO: 712 - protein, 133 aa, Medicago truncatula
  misc_feature: Public GI ID no.144923134
  misc_feature: Bit score of 235.1 for HMM based on sequences of FIGURE 6.
  misc_feature: Functional Homolog Of Ceres SEEDLINE ID no. ME03227 at SEQ ID NO. 711
MAGISAVIIVISIFLMVLVVADDMSSSSLSSSSSSVIRLPSKVTAEGKNVCAGAVASSWCPVKCFRTDPVCGVDGVTYWCGCAEAACAGVKVGKMGFCEVGSGGSAPLSAQAFLLLHIVWLIVLAFSVFFGLF

SEQ ID NO: 713 - DNA, 624 bp, Brassica napus
  misc_feature: Ceres CLONE ID no.964616
  misc_feature: Encodes the peptide sequence at SEQ ID NO 714
aattctcctgtcgttgtttcctttcaagaaaaagagagagagagagagagaggaaataacgtccgtttgaagatccaaatctcggcaatgtcgacgttctcgccatcgttggccgtcctctctctgattcttctgagcctctctctggtttcatcgmcggagattaacaagggaggagagattcgattaccttccgagaagaccaacggtgaattctgcgggaaaacgtctaaaccggcttcgtgtccggttaagtgttttagggctgatccggtttgcggagaagacggcgttacgtactggtgcggttgtgcagatgctctgtgccacggcgttcgtgtctctaaacctggagcttgtgatgttggtaatggcgttgggttgtctgttcctggacaagctctgcttttgatccacattgtctggatgatggctcttgggttttcgatcctctttggcctyttytgattttttttttttgttggggattaagaagatagagattggtaggttttgaggttgcaaccmctgaatctttttgttgataatcattgatataaaatgttgagttttatttcctaattgatgkgcagaaaaaaaaaatgatatgtattgatatattmc

SEQ ID NO: 714 - protein, 126 aa, Brassica napus
  misc_feature: Ceres CLONE ID no.964616
  misc_feature: Bit score of 311.2 for HMM based on sequences of FIGURE 6.
  misc_feature: Functional Homolog Of Ceres SEEDLINE ID no. ME03227 at SEQ ID NO. 711
  misc_feature (24)..(24): Xaa is any aa, unknown, or other
  misc_feature (125)..(125): Xaa is any aa, unknown, or other
  misc_feature (126)..(126): Xaa is any aa, unknown, or other
MSTFSPSLAVLSLILLSLSLVSSXEINKGGEIRLPSEKTNGEFCGKTSKPASCPVKCFRADPVCGEDGVTYWCGCADALCHGVRVSKPGACDVGNGVGLSVPGQALLLIHIVWMMALGFSILFGXX

SEQ ID NO: 715 - protein, 135 aa, Gossypium hirsutum
  misc_feature: Ceres CLONE ID no.100009667
  misc_feature: Bit score of 354.8 for HMM based on sequences of FIGURE 6.
  misc_feature: Functional Homolog Of Ceres SEEDLINE ID no. ME03227 at SEQ ID NO. 711
MPCFTATPFYLLTLFLLFFYFSPQIAQSSPDNSRSIRLPSDGFTIADDNEGVCARFTKPASCPVTCFRTEPVCGVDGVTYWCGCADAYCAGTRVAKSGFCEVGNGGSASVPGQALLLVHIVWLILLGFFVLCGLF

SEQ ID NO: 716 - DNA, 558 bp, Populus balsamifera subsp. trichocarpa
  misc_feature: Ceres ANNOT ID no.1471437
  misc_feature: Encodes the peptide sequence at SEQ ID NO 717
atggcgtcaagactctcaagaccgttgtcgttgttttgttccttttccattcctctaggcataccttttcttggtgttcgccataccaatcgcatcgcccaattccctctcttccacgaattcctctgctttcaaaattcaatagtctgtaacaagaacccattaccccttgcctccgtatccatattttcctatattttagggttagggttagggttaggcctctgcttccagatcgcgcgatcggagcctgacgctgcaatattaattcaagaagtcacgaacaaggatggaaagggtgaagcatgcgcagggttaaaagcacccgcttcatgcccaatcaattgtttccgtgcggatcctgtgtgtggttttgatggtgttacttattggtgtgggtgcgctgacgctatgtgcagtggcactcgtgttgctaaattaggggcttgcgaggttggaagtggtggcagcgcttctctacccggtcaagcacttcttttgattcatattgtctggcttatcttgattgggttttctctcttgtttgggtttttttaa

SEQ ID NO: 717 - protein, 185 aa, Populus balsamifera subsp. trichocarpa
  misc_feature: Ceres ANNOT ID no.1471437
  misc_feature: Bit score of 265.0 for HMM based on sequences of FIGURE 6.
  misc_feature: Functional Homolog Of Ceres SEEDLINE ID no. ME03227 at SEQ ID NO. 711
MASRLSRPLSLFCSFSIPLGIPFLGVRHTNRIAQFPLFHEFLCFQNSIVCNKNPLPLASVSIFSYILGLGLGLGLCFQIARSEPDAAILIQEVTNKDGKGEACAGLKAPASCPINCFRADPVCGFDGVTYWCGCADAMCSGTRVAKLGACEVGSGGSASLPGQALLLIHIVWLILIGFSLLFGFF

SEQ ID NO: 718 - DNA, 390 bp, Populus balsamifera subsp. trichocarpa
  misc_feature: Ceres ANNOT ID no.1444568
  misc_feature: Encodes the peptide sequence at SEQ ID NO 719
atgtcgaaattctcagcaattttcacatgcgtcactattttcttattgagcagtctctgcttcccgatcgcgctatcggaaactggcgctggaatattgattcaagaagtcacaagagaggatggtaagggtgatgcatgcgcaggattaaaagcacccgcttcatgtccgatcaattgtttccgtgcggaccccgtgtgtggcgtcgatggcgttacttattggtgtgggtgcgctgacgctttgtgcagtggcactcgtgttgataaattaggggcttgtgaggttgggagtggagggagctcttctcttcctggtcaggcacttcttttgattcatattgtctggcttatcttgcttgggttttctctcttgtttgggtttttttaa

SEQ ID NO: 719 - protein, 129 aa, Populus balsamifera subsp. trichocarpa
  misc_feature: Ceres ANNOT ID no.1444568
  misc_feature: Bit score of 317.2 for HMM based on sequences of FIGURE 6.
  misc_feature: Functional Homolog Of Ceres SEEDLINE ID no. ME03227 at SEQ ID NO. 711
MSKFSAIFTCVTIFLLSSLCFPIALSETGAGILIQEVTREDGKGDACAGLKAPASCPINCFRADPVCGVDGVTYWCGCADALCSGTRVDKLGACEVGSGGSSSLPGQALLLIHIVWLILLGFSLLFGFF

SEQ ID NO: 720 - DNA, 474 bp, Brassica napus
  misc_feature: Ceres CLONE ID no.1270484
  misc_feature: Encodes the peptide sequence at SEQ ID NO 721
gaacgcgaatcgggcaaattcgatttatagattgcaggaaccaatcgattccacgtgatgccgtcgttctcgtggatcagcatccccttactcttattgctattctgcttgatcggctcacaagctgcggatgatctcccggagaaatcaagcggtggcgtatgcagcggtgtttcggatccgggcgggtgcccaataaactgtttccgggcggatccggtttgcggagccgacggagtcacgtactggtgcgggtgtcccgacgcggcgtgccacggagctcgcgtggtgaaaacgggagcctgcgacgcgggtaacgcgggaagcgcttctgtgccgggtcaagctttgttactcatccatatcgtttggctcttcttgctcggactctctcttctcgtcggtgctttctgaatggattagataaataagaaaattgatcccaattcgtttgtagctttttcttttgtcgtg

SEQ ID NO: 721 - protein, 118 aa, Brassica napus
  misc_feature: Ceres CLONE ID no.1270484
  misc_feature: Bit score of 203.9 for HMM based on sequences of FIGURE 6.
  misc_feature: Functional Homolog Of Ceres SEEDLINE ID no. ME03227 at SEQ ID NO. 711
MPSFSWISIPLLLLLFCLIGSQAADDLPEKSSGGVCSGVSDPGGCPINCFRADPVCGADGVTYWCGCPDAACHGARVVKTGACDAGNAGSASVPGQALLLIHIVWLFLLGLSLLVGAF

SEQ ID NO: 722 - DNA, 660 bp, Glycine max
  misc_feature: Ceres CLONE ID no.1075098
  misc_feature: Encodes the peptide sequence at SEQ ID NO 723
accaagcaattcaaacaacacggtaacacgcaaactccgagaaaatccccaaatcacataaaattagggttacgaatcggggaaagttgtctctcctttcaccctaattcgatgcctataggtttcaggaaccaagtgatgcggtcgttctcgtggatcatcatccctttactcttattgctattctgcttgatcggctcctcacaagcagcggacgagaaatcaagcggcgacgtgtgcaatacggtttcggatccgggcgggtgcccaataaactgtttccgggcggatccggtttgcggagccgacggagtcacgtactggtgcggttgtcccgacgcggcgtgccacggagctcgcgtggtgaaaacgggagcctgcgacgcgggtaacgcgggaagcgcttctgtgccgggtcaagctttgttactgatccatatcgtttggctcttcttgctcggactctctcttctcgtcggtgctttctgaatggattagataataaggaaattgatcccaattcgtttctgtagcttcttcttttgtcgtgatttatagatcagcacttgtgtttgagatgattcatgcttctgtagatcacacgttatgtgtttgtatgtgtaacgttgagttggtttctcttaatggatttgcttcgtc

SEQ ID NO: 723 - protein, 116 aa, Glycine max
  misc_feature: Ceres CLONE ID no.1075098
  misc_feature: Bit score of 198.4 for HMM based on sequences of FIGURE 6.
  misc_feature: Functional Homolog Of Ceres SEEDLINE ID no. ME03227 at SEQ ID NO. 711
MRSFSWIIIPLLLLLFCLIGSSQAADEKSSGDVCNTVSDPGGCPINCFRADPVCGADGVTYWCGCPDAACHGARVVKTGACDAGNAGSASVPGQALLLIHIVWLFLLGLSLLVGAF

SEQ ID NO: 724 - DNA, 772 bp, Glycine max
  misc_feature: Ceres CLONE ID no.719489
  misc_feature: Encodes the peptide sequence at SEQ ID NO 725
attctccaaccaacggcgacaacaacaaagattctttctagtttcttcctttcctttcctttttcgtcgccaacacggtaaacaaaaccccccaaatttcctcaattagggtttcaatccacattccaattccccaaccctcttcttccccatcctccaaatcccgaaactttccccaactgggtcctcaagtacgccacggcgagccctcgtagctcgcgatctcagaaaccaacgatgccgaaatcctcacgattcctcgtcgtcgcgatcgccgtcgccgcgctctgcgtgatcctccccgtcgcggcggcggcggatctcgaggaccccggcgtgctgcggctgccgtcggacagcctgtgcggcaaaacgacgccgtcttcgtgcccggcaaagtgcttccgcgccgaccccgtttgcggcgcggacggcgtgacgtactggtgcggttgcgcagaggcggcgtgcgcaggcgtggaggttgcgaaattggggttctgtgaagtcgggaatggtggctcggcgccgattcctgggcaagctctgcttttggtgcacattgtttggctcattgtgttggggttctccgtgttgttcggtcttttttagataattgggtttctttatgtatctaccatgatcagagggtgttatggttttggttctttgggattctttgagggttctttttgtaaattgatcaaacggccattcttgtattgtatgtatgattattcttattattgtaatttcacaactttcttgattc

SEQ ID NO: 725 - protein, 124 aa, Glycine max
  misc_feature: Ceres CLONE ID no.719489
  misc_feature: Bit score of 306.0 for HMM based on sequences of FIGURE 6.
  misc_feature: Functional Homolog Of Ceres SEEDLINE ID no. ME03227 at SEQ ID NO. 711
MPKSSRFLVVAIAVAALCVILPVAAAADLEDPGVLRLPSDSLCGKTTPSSCPAKCFRADPVCGADGVTYWCGCAEAACAGVEVAKLGFCEVGNGGSAPIPGQALLLVHIVWLIVLGFSVLFGLF

SEQ ID NO: 726 - protein, 357 aa, Populus balsamifera subsp. trichocarpa
  misc_feature: Ceres ANNOT ID no.1451912
  misc_feature: Bit score of 603.5 for HMM based on sequences of FIGURE 9.
  misc_feature (117)..(351): Pfam Name: Trehalose_PPase Pfam Description: Trehalose-phosphatase
  misc_feature: Functional Homolog Of Ceres SEEDLINE ID no. ME20095 at SEQ ID NO. 1129
MTNQNVVVPNARKGVDITITMALSKSLFSPVVPKPLPAAPGGYFTISRKMFAKKTETGGKTNSWADSMRDSSPTRVKSTTSLSEIEEKNTWIVNHPSALNMFEQIVNGSKGKQIVMFLDYDGTLSPIVEDPDRAFMTNEMREAVRDVARYFPTAIVTGRCRDKVYSFVRLAGLYYAGSHGMDIKGPSKNCCRNKKDYQGVLFQPASDFLPMIDEVYNALLERTKYIPGARVEDNKFCISVHFRCVEEKMWAALVEQVRSVLNGYPKLRLTQGRKVLEIRPTIKWDKGKALEFVLESLGYANSTDVLPVYIGDDRTDEDAFKVLRNRGQGLGILVSKVPKETNASYSLQEPTEASSLI

SEQ ID NO: 727 - protein, 117 aa, Arabidopsis thaliana
  misc_feature: Public GI ID no.18412211
  misc_feature: Bit score of 189.0 for HMM based on sequences of FIGURE 6.
  misc_feature: Functional Homolog Of Ceres SEEDLINE ID no. ME03227 at SEQ ID NO. 711
MPSLTLSIRFLFLVLCLIGLQAADDFPDKSRGDVCPRVKDRGGCTINCFRADPVCGTDGVTYWCGCPDAACHGARVVKKGACDTGNAGSASVPGQALLLIHIVWLFLLGLSLLVGGF

SEQ ID NO: 728 - DNA, 701 bp, Arabidopsis thaliana
  misc_feature: Ceres CLONE ID no.20358
  misc_feature: Encodes the peptide sequence at SEQ ID NO 729
aaaacaacacggttacgcaaactctctctgagaaaatccccaaatctcatgaaattagggtttcaatcattctttgaacgcaaaattagaaacctcctctccatccgccacgaatctctagggttcttctgaaggattagatttctgggttttagaaatctgtctctcgtcatcaacaattcacgtgatgccgtcgttaacactgagcattcgtttccttttcttagttctctgcttgatcggtttacaagctgcggatgatttcccagataaatcccgcggtgacgtatgccctcgggttaaggatcggggtggatgcacaatcaactgtttccgggcggatccggtttgtggaaccgatggagtcacgtactggtgcggttgtcccgacgcagcttgccatggcactcgcgtagtcaaaaaaggagcttgtgacacaggtaatgcaggaagtgcttctgttcctggacaagctttgttattgattcatattgtttggctcttcttgctcggactctctcttctcgttggtggtttctgatctctagagagttagtggtggaattagacaaggaattagatagatcacacgtcctgagtttgttgtatgtgtatagttgagtattgttttgctttgtgtgctatatatatgtaatagattctgttgcagttcattctaataatgaagatttgatcggacg

SEQ ID NO: 729 - protein, 117 aa, Arabidopsis thaliana
  misc_feature: Ceres CLONE ID no.20358
  misc_feature: Bit score of 190.1 for HMM based on sequences of FIGURE 6.
  misc_feature: Functional Homolog Of Ceres SEEDLINE ID no. ME03227 at SEQ ID NO. 711
MPSLTLSIRFLFLVLCLIGLQAADDFPDKSRGDVCPRVKDRGGCTINCFRADPVCGTDGVTYWCGCPDAACHGTRVVKKGACDTGNAGSASVPGQALLLIHIVWLFLLGLSLLVGGF

SEQ ID NO: 730 - DNA, 627 bp, Gossypium hirsutum
  misc_feature: Ceres CLONE ID no.1915503
  misc_feature: Encodes the peptide sequence at SEQ ID NO 731
agttgcagcaaatcctttcaatcacgacacatatgccgtgcttcacggcaattcagctaaacatcctaaccgtcctcctcttcttctgtttctgggcgccgatcgcgcgatccttgccggataattcgggatctatccggttaccttccgacggatttacaaacgccgatgagaacgaaggcgtctccgctcgattcaataagccgtcatcctgcccggtcaattgcttccgaacggagcccgtttgcggcgttaatggcgtcacctactggtgcggtcgcgccgatgcattatgtgccggtactcgcgtggccaaagtaggattttgtgaggtcgggagcggaggtagcgcgtcgtttcctggtcaggctctgcttttggttcatattgtttggctcgtcttgcttggcttttctgtattgtgtggtcttttctaatttttccaaacagagacttttttttgtgtgtgttatttttcctctctcggattctatctgtattctatttgcctaccatgtcattttctcatctgtattactgtaaatcatattctttgtagtaatataccaatttggttctcctttcattataatatcaactattcaccaaaaaaaaaaaaaaaaaaaa

SEQ ID NO: 731 - protein, 134 aa, Gossypium hirsutum
  misc_feature: Ceres CLONE ID no.1915503
  misc_feature: Bit score of 279.5 for HMM based on sequences of FIGURE 6.
  misc_feature: Functional Homolog Of Ceres SEEDLINE ID no. ME03227 at SEQ ID NO. 711
MPCFTAIQLNILTVLLFFCFWAPIARSLPDNSGSIRLPSDGFTNADENEGVSARFNKPSSCPVNCFRTEPVCGVNGVTYWCGRADALCAGTRVAKVGFCEVGSGGSASFPGQALLLVHIVWLVLLGFSVLCGLF

SEQ ID NO: 732 - DNA, 802 bp, Glycine max
  misc_feature: Ceres CLONE ID no.587748
  misc_feature: Encodes the peptide sequence at SEQ ID NO 733
gttaatttcttaacccatcttccaagcattcttatccgacaaggattcctttctctctctcttgatccaatcttttcgtccattaaaattaggattttaaattctcaattttcaattttcaactccaatccctccggcgagctttccaggaagctcgcttctctccgaccatggccggaatcaccaaaacctctcacttttccgtcgttttgatcgccgtcgtcgccctctgcgtcttcccggcagcgacatccgataacgtggcctcggcggtcctcgggttgccgtcccatgtcgctggcgaaggaaagaacttgtgcagcgcggcagcgccgtcgtcgtgtcccgtgaagtgtttccgaaccgacccggtttgcagcgtggacggcgtgacgtactggtgcgggtgcagcgaagccgcgtacgccagcgcacagattgcgaaattggggttctgtgaagtggggaatggcggctccgtcactctttctggtcaggcattgcttctggtgcacattgtgtggctcatcgtgttaggcttctccgtcttctttggtctcttttaatttttttaatgctgagagctgaggagcaaacgtaacacaatacatacacactcatgtctctcactttacaatgatgtaatagctgtttttggtattatgtagcactaggagtttcacaacgttatttaattcagaaattaaaatactttggcctcttacgggagatactagctagcttttattgattgattcgctgaaaatgcagatttacatttttgtcactgttcattcgattt

SEQ ID NO: 733 - protein, 131 aa, Glycine max
  misc_feature: Ceres CLONE ID no.587748
  misc_feature: Bit score of 306.2 for HMM based on sequences of FIGURE 6.
  misc_feature: Functional Homolog Of Ceres SEEDLINE ID no. ME03227 at SEQ ID NO. 711
MAGITKTSHFSVVLIAVVALCVFPAATSDNVASAVLGLPSHVAGEGKNLCSAAAPSSCPVKCFRTDPVCSVDGVTYWCGCSEAAYASAQIAKLGFCEVGNGGSVTLSGQALLLVHIVWLIVLGFSVFFGLF

SEQ ID NO: 734 - protein, 132 aa, Oryza sativa subsp. indica
  misc_feature: Public GI ID no.125528114
  misc_feature: Bit score of 305.0 for HMM based on sequences of FIGURE 6.
  misc_feature: Functional Homolog Of Ceres SEEDLINE ID no. ME03227 at SEQ ID NO. 711
MPPSYTPTARLRLLVLFLASLSLLFAQTLASSSAAASAEAEVSDPCAAPVSDGGSEAQLCPVRCFRPDPVCGADGVTYWCGCPEAACAGARVARRGYCEVGAGSAPVSGQALLLVHIVWLFVLGAAVLLGFL

SEQ ID NO: 735 - protein, 128 aa, Oryza sativa subsp. japonica
  misc_feature: Public GI ID no.115440619
  misc_feature: Bit score of 292.4 for HMM based on sequences of FIGURE 6.
  misc_feature: Functional Homolog Of Ceres SEEDLINE ID no. ME03227 at SEQ ID NO. 711
MPPSYTPTARLRLLVLFLASLSLLFAQTLASSSAEAEVSDPCAAPVSDGGSEAQLCPVRCFRPDPVCGADGVTYWCGCPEAACAGARVARRGYCEVGAGSAPVSGQALLLVHIVWLFVLGAAVLLGFL

SEQ ID NO: 736 - DNA, 967 bp, Zea mays
  misc_feature: Ceres CLONE ID no.274172
  misc_feature: Encodes the peptide sequence at SEQ ID NO 737
aattgctattctggggcaaggcgaaatggaacaagagcaagcggccaaccgccagcccaacgccaacgcggtccagccaagtccaacccgtacccaccacgccgccgacgccgacgcgtcgccaacgggaacttctcaaagcgccgacggggtccaccgcgcccgttatttcatcaatcgactcaactaccgcggcctcctcctcgcagaccccgaaggccgccgtgcctcccgccccgcccctcgccggcgaccatcggccgccggcgacacccggcatgccgcccgcccgcttcgtccacctcatcctcctcgcgacgctttcgctcctcctcgcgcagaccctggcctcctcgtcccccgcgcccgcctccgccgccacggcgggggagcccggcgacccctgcgcggccgccgtcgcggacggggacggcgacgtcccgctgtgcccggtgcggtgcttccggccggacccggtctgcggcgccgacggggtcacgtactggtgcggctgccccgaggcagcatgcgcgggcgcccgcgtggctcggcgcggctactgcgaggtcggcgccggctccgcgcccgtctcgggccaggcgctgctgctcgtccacatcgtctggctcttcgtgctcggcgccgccgtcctcctcggcttcctttgatgctctccgtctttcccgcccgttcccgcaggtgtattcccctacccgtaatcactgtcccgatctttgtgttggctctttcctgtgctgctgagggctcaggaatggtgatctggcgatttcgtcgagaggactcgtctagagatgtaactcggttctttgaacttctttctcagatatgttgggatcagctgtgctctacattttggagcagagctgtgatgattggttgttaaatgctgtagattgagattatgtaaaaacagttgtaaattctttgctaacaaattgcattgatc

SEQ ID NO: 737 - protein, 129 aa, Zea mays
  misc_feature: Ceres CLONE ID no.274172
  misc_feature: Bit score of 283.3 for HMM based on sequences of FIGURE 6.
  misc_feature: Functional Homolog Of Ceres SEEDLINE ID no. ME03227 at SEQ ID NO. 711
MPPARFVHLILLATLSLLLAQTLASSSPAPASAATAGEPGDPCAAAVADGDGDVPLCPVRCFRPDPVCGADGVTYWCGCPEAACAGARVARRGYCEVGAGSAPVSGQALLLVHIVWLFVLGAAVLLGFL

SEQ ID NO: 738 - protein, 129 aa, Oryza sativa subsp. japonica
  misc_feature: Public GI ID no.125572387
  misc_feature: Bit score of 186.3 for HMM based on sequences of FIGURE 6.
  misc_feature: Functional Homolog Of Ceres SEEDLINE ID no. ME03227 at SEQ ID NO. 711
MPPSYTPTARLRLLVLFLASLSLLFAQTLASSSAEAEVSDPCAAPVSDGGSEAQLCPVRCFRAGTRSAAPTGSRTGAGAPRPACAGARVARRGYCEVGAGSAPVSGQALLLVHIVWLFVLGAAVLLGFL

SEQ ID NO: 739 - DNA, 396 bp, Sorghum bicolor
  misc_feature: Ceres ANNOT ID no.6015812
  misc_feature: Encodes the peptide sequence at SEQ ID NO 740
atgccgccctcccgcctcgtccacctcatcctcctcgccacgctctcgctcctcctcgcgcaaaccctagccacctcttcccccacgcccgccgccgcgtcggcggcggcggaggcggagtccggcgacccctgcgcggccgccgtcgcggacggggacggagacgtcccgctgtgcccggtgcggtgcttccgcccggacccggtctgcggcgccgacggggtcacgtactggtgcggctgccccgaggcgacctgcgcgggggcccgcgtggcgcgccgcggctactgcgaggtcggcgccggctccgcgcccgtctcgggccaggcgctgctgctcgtccacatcgtctggctcttcgtgctcggcgccgccgtcctcctcggcttcctctga

SEQ ID NO: 740 - protein, 131 aa, Sorghum bicolor
  misc_feature: Ceres ANNOT ID no.6015812
  misc_feature: Bit score of 267.1 for HMM based on sequences of FIGURE 6.
  misc_feature: Functional Homolog Of Ceres SEEDLINE ID no. ME03227 at SEQ ID NO. 711
MPPSRLVHLILLATLSLLLAQTLATSSPTPAAASAAAEAESGDPCAAAVADGDGDVPLCPVRCFRPDPVCGADGVTYWCGCPEATCAGARVARRGYCEVGAGSAPVSGQALLLVHIVWLFVLGAAVLLGFL

SEQ ID NO: 741 - protein, 370 aa, Sorghum bicolor
  misc_feature: Ceres ANNOT ID no.6017545
  misc_feature: Bit score of 867.1 for HMM based on sequences of FIGURE 9.
  misc_feature (116)..(350): Pfam Name: Trehalose_PPase Pfam Description: Trehalose-phosphatase
  misc_feature: Functional Homolog Of Ceres SEEDLINE ID no. ME20095 at SEQ ID NO. 1129
MDMSSSSPVITDPISISPPLLGGLTSNLMPFSVMSGGCSSPSMTASRRKIEEVLVNGLLDAMKSSSPRKKHNLAFGQDNSLDEDPAYSAWLSKCPSALTSFKQIVANAQGRRIAVFLDYDGTLSPIVDDPDKAFMSPVMRAAVRNVAKYFPTAIVSGRSRKKVSEFVQLKELYYAGSHGMDIVTSVAAHATEKCKQANLFQPACEFLPMIDEVSKSLLEVTSGIEGARVENNKFCVSVHYRNVAEKDWKVVAGLVKQVLEAFPRLKVTNGRMVLEVRPVIDWDKGKAVEFLLQSLGLNDSEDVIPIYIGDDRTDEDAFKVLRERKCGYGILVSQVPKDTTEAFYSLRDPSEVMGFLNSLVRWKKHSLRRN

SEQ ID NO: 742 - protein, 161 aa, Arabidopsis thaliana
  misc_feature: Ceres SEEDLINE ID no.ME04477
  misc_feature: Bit score of 409.1 for HMM based on sequences of FIGURE 7.
  misc_feature (102)..(142): Pfam Name: zf-AN1 Pfam Description: AN1-like Zinc finger
  misc_feature (13)..(37): Pfam Name: zf-A20 Pfam Description: A20-like zinc finger
MAEEHRCETPEGHRLCVNNCGFFGSSATMNLCSNCYGDLCLKQQQQASMKSTVESSLSPVIAPVLENYAAELEIPTTKKTEEKKPIQIPTEQPSPPQRPNRCTVCRKRVGLTGFMCRCGTTFCGSHRYPEVHGCTFDFKSAGREEIAKANPLVIAAKLQKI

SEQ ID NO: 743 - protein, 172 aa, Vitis vinifera
  misc_feature: Public GI ID no.147783026
  misc_feature: Bit score of 368.7 for HMM based on sequences of FIGURE 7.
  misc_feature (113)..(153): Pfam Name: zf-AN1 Pfam Description: AN1-like Zinc finger
  misc_feature (15)..(39): Pfam Name: zf-A20 Pfam Description: A20-like zinc finger
  misc_feature: Functional Homolog Of Ceres SEEDLINE ID no. ME04477 at SEQ ID NO. 742
MESHDETGCQAPEGPILCINNCGFFGSAATMNMCSKCHKDLALKQEQAKLAASSIGSIVNGSSSGNGKEPIVAGTVDVQAGPVEVKAISAEASNDSSSNQIIESKVKEGPNRCTACRKRVGLTGFNCKCGNLFCAVHRYSDKHDCPFDYRTAARDAIAKANPVVKAEKLDKI

SEQ ID NO: 744 - protein, 171 aa, Citrus cv. Shiranuhi
  misc_feature: Public GI ID no.119367488
  misc_feature: Bit score of 347.5 for HMM based on sequences of FIGURE 7.
  misc_feature (112)..(152): Pfam Name: zf-AN1 Pfam Description: AN1-like Zinc finger
  misc_feature (15)..(39): Pfam Name: zf-A20 Pfam Description: A20-like zinc finger
  misc_feature: Functional Homolog Of Ceres SEEDLINE ID no. ME04477 at SEQ ID NO. 742
MESHDETGCQAPEGPILCVNNCGFFGSAATMNMCSKCHKAMILNQEQAQLAASSIGSIVHGSSGGTGKEPIIAGSVDLQVGPVEIKKFSMEPSSGSSFGFAGVKAKEGPKRCTTCNKRVGLTGFNCRCGNLFCAVHRYSDKHGCPFDYRTAAREAIAKANPVVKAEKLDKI

SEQ ID NO: 745 - protein, 172 aa, Vitis vinifera
  misc_feature: Public GI ID no.147860340
  misc_feature: Bit score of 328.4 for HMM based on sequences of FIGURE 7.
  misc_feature (113)..(153): Pfam Name: zf-AN1 Pfam Description: AN1-like Zinc finger
  misc_feature (15)..(39): Pfam Name: zf-A20 Pfam Description: A20-like zinc finger
  misc_feature: Functional Homolog Of Ceres SEEDLINE ID no. ME04477 at SEQ ID NO. 742
MDHNETGCQAPPEAPILCINNCGFFGSAATMNMCSKCHKDLVLKQEQAKLAASSFESIVEGSSNCNAKESMVAIAKADIIQTGPSESMPVPTQAACASPSETNDRVKEGPNRCSSCRKRVGLTGFNCRCGNIFCAVHRYSDKHACPFDYRTAARDAIAKSNPVIKPEKLDKI

SEQ ID NO: 746 - protein, 126 aa, Brassica napus
  misc_feature: Ceres Clone ID no. 964616
  misc_feature (1)..(126): Bit score of 321.1 for hmm based on sequences of FIGURE 6.
  misc_feature: Functional Homolog Of SEQ ID NO. 711
MSTFSPSLAVLSLILLSLSLVSSTEINKGGEIRLPSEKTNGEFCGKTSKPASCPVKCFRADPVCGEDGVTYWCGCADALCHGVRVSKPGACDVGNGVGLSVPGQALLLIHIVWMMALGFSILFGLF

SEQ ID NO: 747 - protein, 131 aa, Picea sitchensis
  misc_feature: Public GI ID no. 116784747
  misc_feature (1)..(131): Bit score of 212.2 for hmm based on sequences of FIGURE 6.
  misc_feature: Functional Homolog Of SEQ ID NO. 711
MAGYVQPGLVLILLFLITNTLFGAALSGPESEIAIALPSEGNTRRLSVCSEKNESASCPVSCFRPDPVCGVDGITYWCGCTDAQCAGVDVAKIGFCEVGNGGSGLLSGEALLLVHIVWLILLGFIVLIGVP

SEQ ID NO: 748 - protein, 173 aa, Gossypium hirsutum
  misc_feature: Ceres CLONE ID no.1793946
  misc_feature: Bit score of 350.2 for HMM based on sequences of FIGURE 15.
  misc_feature (114)..(154): Pfam Name: zf-AN1 Pfam Description: AN1-like Zinc finger
  misc_feature (18)..(42): Pfam Name: zf-A20 Pfam Description: A20-like Zinc finger
  misc_feature: Functional Homolog Of Ceres SEEDLINE ID no. ME02401 at SEQ ID NO. 749
MAQRTEKEETEFKVPETLTLCVNDCGVIGNPATNNMCQNCFNATTPKSTAAVVSSSTGGASSGGVSILNQRSTTSRSINKRSDLSPPKTTTFVRSSGSRNDPEPGTEKKVVNRCSGCRKRVGLTGFRCRCGELFCADHRYSDRHDCSYDYKTVGREAIARENPVVKAAKIIKV

SEQ ID NO: 749 - protein, 160 aa, Arabidopsis thaliana
  misc_feature: Ceres SEEDLINE ID no.ME02401
  misc_feature (101)..(141): Pfam Name: zf-AN1 Pfam Description: AN1-like Zinc finger
  misc_feature (23)..(47): Pfam Name: zf-A20 Pfam Description: A20-like zinc finger
  misc_feature: Bit score of 407.3 for HMM based on sequences of FIGURE 15.
MAQRTEKEETEFKVLETLTTTTTTLCTNNCGVTANPATNNMCQKCFNASLVSAAAGVVESGSILKRSARSVNLRSSPAKVVIRPREIDAVKKRDQQIVNRCSGCRKKVGLTGFRCRCGELFCSEHRYSDRHDCSYDYKTAGREAIARENPVVKAAKMVKV

SEQ ID NO: 750 - DNA, 870 bp, Zea mays
  misc_feature: Ceres Clone ID no. 273507
  misc_feature: Encodes the peptide sequence at SEQ ID NO. 751
acccaccacgtcgtcgacgccgacgcgtcgccaacggaaacttctcaaagcgccgacggggttccacggcgcccgtaatttcaaccgtccccaccgccgcgggctcctcctgacggaccccgaaggtcgccgtgactcccgcccctcgccggcgacgtccggcatgccgtcctcccgcctcttccgcctcttcctcctcgcgacgctctcgctcctcctcgcgcaaaccctagcctcctctgcccccgtgcccgccgccgcgtcggcgtcggcggagtccaccgacccctgcgcggccgccgtagctgacggggaagctgacgttccgctgtgccccgtgcggtgcttccgcccagacccggtctgcggcgccgacggggtcacgtactggtgcggctgccccgaggcgacctgcgcgggcgcccgcgtggcgcgacgcggctactgcgaggtcggcgccggctccggctccgcgcccgtctcgggccaggcgctgctgctcgtccacatcgtctggctcttcgtgctcggcgccgccgtcctcctcggtttcctctgatgcgcctctcgcgttcccgcagttgtattcccctcccccatattctttgtcccgatcttctgttggttcttgtcttcttgttgtgctgttgatggctgaggaattgcgatgtaacgatttagttgtaattttgagaggatccgtctagagatgtaacccggttcttcgtcagatctgtcgggttcagctgtgctcaacacttcgaagcagagctgcgatgattggttgtcaaatgttgtaggttgaggtcatgtaaaacagttgtaaattcctcattaacgaatcgcattgatcagattgttttgttgtcc

SEQ ID NO: 751 - protein, 131 aa, Zea mays
  misc_feature: Ceres Clone ID no. 273507
  misc_feature (1)..(131): Bit score of 252.2 for hmm based on sequences of FIGURE 6.
  misc_feature: Functional Homolog Of SEQ ID NO. 711
MPSSRLFRLFLLATLSLLLAQTLASSAPVPAAASASAESTDPCAAAVADGEADVPLCPVRCFRPDPVCGADGVTYWCGCPEATCAGARVARRGYCEVGAGSGSAPVSGQALLLVHIVWLFVLGAAVLLGFL

SEQ ID NO: 752 - protein, 126 aa, Vitis vinifera
  misc_feature: Public GI ID no. 157355175
  misc_feature (1)..(126): Bit score of 210.5 for hmm based on sequences of FIGURE 6.
  misc_feature: Functional Homolog Of SEQ ID NO. 711
MEFNRSRLLSSFVVIFIVFAICFPPTVTSSVIRLPSDAVDGESDGGLCGGSEVAASCPVKCFRPDPVCGVDGVTYWCGCTEARCAGTAVAHFGICEVGNGSAGQALLLVHIVWLMVLGFSVLFGLF

SEQ ID NO: 753 - protein, 496 aa, Vitis vinifera
  misc_feature: Public GI ID no. 157341912
  misc_feature (1)..(496): Bit score of 759.0 for hmm based on sequences of FIGURE 11.
  misc_feature (33)..(209): Pfam Name: HSF_DNA-bind Pfam Description: HSF-type DNA-binding
  misc_feature: Functional Homolog Of SEQ ID NO. 364
MEGASGSSSAVNSGGGGGGAPPPHPIPNSNAPPPFLSKTYDMVDDPATNSIVSWSPTNNSFVVWNPPEFARDLLPKYFKHNNFSSFVRQLNTYGFRKVDPDRWEFANEGFLRGQKHLLRSINRRKPAHGHNLQQPQQSHSQGSSVGACVEVGKFGLEEEVERLKRDKNVLMQELVRLRQQQQTTDNQLQTMVQRLQGMEQRQQQMMSFLAKAVQSPGFLAQFVQQQNESNRRITEANKKRRLKREDTAEGEHSAAPSDGQIVKYQPLMNEATKAMLRQMVKMDTSAFSNDSDNFLIGDVSSSSNGVEKGGSSTCVSGVTLQEVPPTSLPVASGVPSHDPPSAPISEIQSPPDICALVGAQEAVPISIALPDVILPELSQIPEMLPKSIVDIHKDDYVGPQSGNVEFMDPISLGIDGAMPIDIDNISADPDIDALLDASSNFWEDLLVDNDEVESTPLEDTTKGNEMQPSENGWDKAQHMAKLTEQMGLLTSDTKRI

SEQ ID NO: 754 - protein, 361 aa, Vitis vinifera
  misc_feature: Public GI ID no. 157339268
  misc_feature (1)..(361): Bit score of 690.6 for hmm based on sequences of FIGURE 11.
  misc_feature (27)..(194): Pfam Name: HSF_DNA-bind Pfam Description: HSF-type DNA-binding
  misc_feature: Functional Homolog Of SEQ ID NO. 364
MGSSSSSSSSPGFAPHPLEGLHEVGPPPFLTKTFDMVEDPATDSVVSWSRARNSFIVWDSHKFSTTLLPRYFKHSNFSSFIRQLNTYGFRKVDPDRWEFANEGFLGGQKHLLKNIKRRRHVSQNTQQGGLGACVELGQYGLEDELERLKRDRNVLMAEIGKLRQQQQNSRNELVAMEGRMQNTEKKQMQMMTFLAKALNNPSFVQQFIQQRRELRGAEIGRKRRLTTSQSAENLQEVITVASIDQAFSYTNQDDGDMSGIESEIETFFSGGWDNESSEDIKDPKADSIDNNLGSVNDVIWEELLSDDLIAGNEEEVPPLRLGDHHEPETDVEVEDLVATPSDWGEDFQDLVDQMAFLRSKS

SEQ ID NO: 755 - protein, 361 aa, Vitis vinifera
  misc_feature: Public GI ID no. 157348009
  misc_feature (1)..(361): Bit score of 502.0 for hmm based on sequences of FIGURE 11.
  misc_feature (39)..(207): Pfam Name: HSF_DNA-bind Pfam Description: HSF-type DNA-binding
  misc_feature: Functional Homolog Of SEQ ID NO. 364
MNPMYPVKEEFPGSSSSPQSGEPPVVPQPVEGLHDAGPPPFLTKTFDIVDDPASDHVVSWSRAGSSFVVWDPHAFSTNLLPKNFKHNNFSSFVRQLNTYGFRKIDPDRWEFANEGFIRGQRHLLKNIRRRKTPSQAPPPHQALDPCVEVGRFGLDGEVDRLQRDKHVLMMELVKLRQQQQNTRITLQAMEQRLQGTEIKQQQMMNFLARAMQNPAFIQQLVQQKERRKEIVEAISKKRRRPIDQGTSGAGGTESSHGNGLRNPIKIEPLHFTEGNGFEVSELEALAFEMQGLGRPRKELEDHEELDPPESEDKELDEGFWEELLNERFGCPSSLPGAEGEEEEEDVNVLAGRFGYLGSSPQ

SEQ ID NO: 756 - protein, 306 aa, Carex stenophylla subsp. stenophylloides
  misc_feature: Public GI ID no. 151303349
  misc_feature (1)..(306): Bit score of 450.9 for hmm based on sequences of FIGURE 11.
  misc_feature (32)..(202): Pfam Name: HSF_DNA-bind Pfam Description: HSF-type DNA-binding
  misc_feature: Functional Homolog Of SEQ ID NO. 364
MDPVKVKNEVLVQPAHGPAPGPMESLHEGGPPPFLRKTYEIVDDPSTNQVVSWGPAGNSFVVWDPHQFATTLLPRYFKHGNFSSFVRQLNTYGFRKIDPDKWEFANEGFFHGQRNLLKSIKRRKSPANISAIQQSQPLDQCLELGQFGPEQEIDRLKRDKNTLIAEVIKLRQEHIVTRSHVQAMEEKLEDAEKKQHQVMGFLARAMQNPTFLQQLAQQHEKRKEIEEAISKKRRRPIEAGSSSTQCPPLFGEIGTGAGAFREDGELENDFWEELLQDEMVKEEADVENDVEALARQLGYMTSHRPE

SEQ ID NO: 757 - protein, 170 aa, Oryza sativa subsp. japonica
  misc_feature: Public GI ID no.115477170
  misc_feature: Bit score of 345.0 for HMM based on sequences of FIGURE 7.
  misc_feature (111)..(151): Pfam Name: zf-AN1 Pfam Description: AN1-like Zinc finger
  misc_feature (19)..(43): Pfam Name: zf-A20 Pfam Description: A20-like zinc finger
  misc_feature: Functional Homolog Of Ceres SEEDLINE ID no. ME04477 at SEQ ID NO. 742
MAQREKKVEEPTELRAPEMTLCANSCGFPGNPATNNLCQNCFLAASASSSSSSAAASPSTTSLPVFPVVEKPRQAVQSSAAAAVALVVERPTAGPVESSSKASRSSSVNRCHSCRRRVGLTGFRCRCGELYCGAHRYSDRHDCSFDYKSAARDAIARENPVVRAAKIVRF

SEQ ID NO: 758 - DNA, 586 bp, Papaver somniferum
  misc_feature: Ceres CLONE ID no.1620215
  misc_feature: Encodes the peptide sequence at SEQ ID NO 759
atctccaaaacaatcaaaaatctgcaaaaaaaaaaaaaatcatttctcaaattctactcagattcatggctcagagagataaagaagaaacagaaatgaaggtttctgaatccttatcactttgcatcaacaactgtggtttctcaggtaatccggctaccaagaacatgtgtcaaagttgttacaaaatttctaccgggattatgacacaaccggctctgacgttttccggcaaagaaaaggctagatctagctttctgaggttgccggagcgatcggattatcaacgacgagatctgattacgcaggatgataagaaaggaattgatgatgatcaagcgaagaatgattcgacgacaattaagattgttgagaagaagcaagaggtgaatcggtgttcaggttgccggaggaaagtaggattgaccggatttagatgtcggtgcggtgatatgttctgttcggaacatagatattccgatcgacatgactgtagttttgattataaagctgctggtagagagagtattgctcgccagaatcctgtcgttaaagctgctaagattattagactctaaattaatgt

SEQ ID NO: 759 - protein, 170 aa, Papaver somniferum
  misc_feature: Ceres CLONE ID no.1620215
  misc_feature: Bit score of 293.8 for HMM based on sequences of FIGURE 7.
  misc_feature (111)..(151): Pfam Name: zf-AN1 Pfam Description: AN1-like Zinc finger
  misc_feature (17)..(41): Pfam Name: zf-A20 Pfam Description: A20-like zinc finger
  misc_feature: Functional Homolog Of Ceres SEEDLINE ID no. ME04477 at SEQ ID NO. 742
MAQRDKEETEMKVSESLSLCINNCGFSGNPATKNMCQSCYKISTGIMTQPALTFSGKEKARSSFLRLPERSDYQRRDLITQDDKKGIDDDQAKNDSTTIKIVEKKQEVNRCSGCRRKVGLTGFRCRCGDMFCSEHRYSDRHDCSFDYKAAGRESIARQNPVVKAAKIIRL

SEQ ID NO: 760 - protein, 398 aa, Vitis vinifera
  misc_feature: Public GI ID no. 157342621
  misc_feature (1)..(398): Bit score of 365.4 for hmm based on sequences of FIGURE 11.
  misc_feature (68)..(233): Pfam Name: HSF_DNA-bind Pfam Description: HSF-type DNA-binding
  misc_feature: Functional Homolog Of SEQ ID NO. 364
MESVEVKEESMWVEVEDSGELWGSSVAAKEEKMLEADGGGESGWCCSSLAAAAEVAKPMEGLHEAGPPPFLKKTFEMVEDPETDSVVSWSVARNSFIVWDSHNFSQSLLPKYFKHSNFSSFIRQLNTYGFRKIDSDRWEFANEAFQGGKRHLLKNIKRRRHGCLQQQGSRSGAESVKLQLEAEVESLRKDQNILNVEILRMRQRQETSQNHLTAVEERIRGAECKQKQMFIFMAKAVKNPSFVQQLIQKRQKRELGDGEIGKKRRLASMLSVGSLLEAIFSNQTVHYRNQNLVQEEPSLQSEIQSLFCSGIDDESGGSPPEDQEANVISGTGNPDLLSFNNGMLEKLMEEDPICQNEAEELLSGKPSILDFELEEWIEKPVDWSVYVKELMEPQFGCV

SEQ ID NO: 761 - protein, 161 aa, Gossypium hirsutum
  misc_feature: Ceres CLONE ID no.1931889
  misc_feature: Bit score of 394.0 for HMM based on sequences of FIGURE 7.
  misc_feature (102)..(142): Pfam Name: zf-AN1 Pfam Description: AN1-like Zinc finger
  misc_feature (13)..(37): Pfam Name: zf-A20 Pfam Description: A20-like zinc finger
  misc_feature: Functional Homolog Of Ceres SEEDLINE ID no. ME04477 at SEQ ID NO. 742
MAEEHRCQAPEGHRLCVNNCGFFGNSATMNLCSKCYRDLCLKEQEASSIKSALSSSPSSSSTVVESISQVPLLALPEVNRESAVPEIAPAAEQLSQQQPNRCMVCRKRVGLTGFRCKCGVTFCGSHRYPENHGCTFDFKKVGREEIARANPLVKAGKLEKI

SEQ ID NO: 762 - DNA, 915 bp, Gossypium hirsutum
  misc_feature: Ceres CLONE ID no.1798756
  misc_feature: Encodes the peptide sequence at SEQ ID NO 763
gatctttctgataatcctttcctttgttcatattctccctttctgcttcttatttattttctttcaccttttcctttcaagatcgagagaaaaaagaatggcagaggagcatagatgccaagcgccagaaggccatcgtctttgcgtcaataactgcggctttttcggaagttcggcgacgatgaacctttgctccaaatgttacagagatctctgtctcaaggaacaggaagcttcttcgatcaaatccgctctttcctcttccccttcgtcttcatcaacggtcgtcgaatccatttctcaggttcctcttttggctctccatgaagtcaacagagaatcggcggttccggagattgcatcggcggccgaacagcgatcgcagcaacaaccgaatcggtgcatggtttgcaggaagcgggtcgggttgaccggattcagatgcaagtgcggtgttacgttttgtgggtcccacaggtaccctgagaatcacgggtgtacgttcgatttcaagaaggtcggcagagaggagatagcacgcgctaatcccctcgtcaaagcagagaagctcgagaagatttgagtagaagatgatgatgatgggaagccaagccattgggaaaatttcaaatttcatcaaacgttgataaggtcgagacacgtgtttcggaggtggtccctaccaccaagagtaaaccaattgggctggataaatatattttcttcttaaaatataaatattttataataatatttaaattatgtgcctctttagttttttttttttctcttcctcttttgctttgtaaaaaaaaaaaaagtcactttttcttttcttcttttaatcccttgtggtgaaaaaaagaaaaagaaatgtagattcctgcttcttccaaaaaaaaaaaaaaaaaaaaa

SEQ ID NO: 763 - protein, 161 aa, Gossypium hirsutum
  misc_feature: Ceres CLONE ID no.1798756
  misc_feature: Bit score of 363.6 for HMM based on sequences of FIGURE 7.
  misc_feature (102)..(142): Pfam Name: zf-AN1 Pfam Description: AN1-like Zinc finger
  misc_feature (13)..(37): Pfam Name: zf-A20 Pfam Description: A20-like zinc finger
  misc_feature: Functional Homolog Of Ceres SEEDLINE ID no. ME04477 at SEQ ID NO. 742
MAEEHRCQAPEGHRLCVNNCGFFGSSATMNLCSKCYRDLCLKEQEASSIKSALSSSPSSSSTVVESISQVPLLALHEVNRESAVPEIASAAEQRSQQQPNRCMVCRKRVGLTGFRCKCGVTFCGSHRYPENHGCTFDFKKVGREEIARANPLVKAEKLEKI

SEQ ID NO: 764 - DNA, 1074 bp, Populus balsamifera subsp. trichocarpa
  misc_feature: Ceres ANNOT ID no.1451912
  misc_feature: Encodes the peptide sequence at SEQ ID NO 726
atgacaaaccagaatgtggttgtgcctaatgccagaaaaggtgttgatatcaccatcacaatggccctgtccaagtctctgttttcacctgttgtgccgaagccattgccagctgctcctggtgggtatttcacaatatcccggaagatgttcgcaaagaagactgaaactggaggcaaaaccaattcctgggctgattctatgagagattcttcacctacccgtgtcaaatccactacgtctttatcagaaatcgaggagaaaaatacttggattgtaaatcatccttctgctttgaacatgttcgagcaaatagtgaatggctcaaagggaaaacagattgtaatgtttttagattatgatggtacactgtcacccattgttgaagatcctgacagggcattcatgaccaacgagatgagagaagctgttagggacgtcgctagatactttcccactgctatagtgacgggaaggtgtagggataaggtgtacagcttcgtaagattggcagggctttattacgctggtagccatggcatggacatcaagggaccatccaagaattgttgcagaaacaaaaaagattatcaaggtgtactttttcaacctgccagtgattttttacccatgattgatgaggtgtacaatgctttgctggagagaacaaagtatatcccaggggctagagtagaagacaacaaattttgcatatccgtacactttcgttgtgtcgaggaaaagatgtgggctgcattagtagagcaagtaagatcagttctcaatggttatccaaaacttcgattaactcaagggaggaaggttttagagatccgacccaccattaaatgggacaagggcaaagctcttgagttcgtgttggaatcattaggatatgccaattctactgatgttttaccagtttatattggagatgatcgaactgatgaggatgcattcaaggttctaagaaacaggggacaagggcttgggattcttgtttctaaagttcccaaggaaacaaatgcctcgtattctctacaagagccaacagaggcaagttctttaatctaa

SEQ ID NO: 765 - protein, 318 aa, Populus balsamifera subsp. trichocarpa
  misc_feature: Ceres ANNOT ID no.1504999
  misc_feature: Bit score of 560.3 for HMM based on sequences of FIGURE 9.
  misc_feature (68)..(302): Pfam Name: Trehalose_PPase Pfam Description: Trehalose-phosphatase
  misc_feature: Functional Homolog Of Ceres SEEDLINE ID no. ME20095 at SEQ ID NO. 1129
MFAKKTETGGKTNSWADSMRDSSPTRVKSTTSLSEIEEKNTWIVNHPSALNMFEQIVNGSKGKQIVMFLDYDGTLSPIVEDPDRAFMTNEMREAVRDVARYFPTAIVTGRCRDKVYSFVRLAGLYYAGSHGMDIKGPSKNCCRNKKDYQGVLFQPASDFLPMIDEVYNALLERTKYIPGARVEDNKFCISVHFRCVEEKMWAALVEQVRSVLNGYPKLRLTQGRKVLEIRPTIKWDKGKALEFVLESLGYANSTDVLPVYIGDDRTDEDAFKVLRNRGQGLGILVSKVPKETNASYSLQEPTEARDLWSLLYFLDAKK

SEQ ID NO: 766 - DNA, 852 bp, Gossypium hirsutum
  misc_feature: Ceres CLONE ID no.1918424
  misc_feature: Encodes the peptide sequence at SEQ ID NO 767
gttcacattcttccttccaccttttcctttcaagatcgaaagattttttctttttttaaaaatggcggaggagcatagatgccaaacgccggaaggccaccgtctttgcgttaacaactgcggctttttcggaagtccggcgacaatgaatctttgctctaaatgttatagagatttccgtcttaaagaacaacagggagctacttccatcaaatcatctctttcttcctctccttcgttttcatcttcgtcagtcgttgtcgaatccgtttctcaggttccgctgttcaatctgcctgagttcattggagaatcgccagttcctgcagtggaggttgccctggtggctgagcaacggccgcaacagcaacaaccgaatcgatgcatggtttgcaggaaacgggtcgggttgaccgggttcaggtgcaaatgcgagattacattttgcgggtcccataggtatccagagaatcacgggtgtaccttcgatttcaaggaggttgggagagaggagattgcacgcgcaaatccactggtcaaagcagagaagctggagaagatttgagatgaaagtggaaagccattggatccctcgactttcgatgaaataaaaaaaaaaaagcaaatgaaaatgatctctttaagattgcgacacgtgtttagatgtagtccccaccatgaagagaaaccaattaggctggataaaattattttcatcctaataggttttcttaaaatatatataatattttaatttatgtgcctcttttagtctttctcttttgtaaaaaaagacttttttttttttcttttcaaaaaaaaaaaaaaaaaaaaaaaaaaaaaaaaaaaaaa

SEQ ID NO: 767 - protein, 167 aa, Gossypium hirsutum
  misc_feature: Ceres CLONE ID no.1918424
  misc_feature: Bit score of 336.0 for HMM based on sequences of FIGURE 7.
  misc_feature (108)..(148): Pfam Name: zf-AN1 Pfam Description: AN1-like Zinc finger
  misc_feature (13)..(37): Pfam Name: zf-A20 Pfam Description: A20-like zinc finger
  misc_feature: Functional Homolog Of Ceres SEEDLINE ID no. ME04477 at SEQ ID NO. 742
MAEEHRCQTPEGHRLCVNNCGFFGSPATMNLCSKCYRDFRLKEQQGATSIKSSLSSSPSFSSSSVVVESVSQVPLFNLPEFIGESPVPAVEVALVAEQRPQQQQPNRCMVCRKRVGLTGFRCKCEITFCGSHRYPENHGCTFDFKEVGREEIARANPLVKAEKLEKI

SEQ ID NO: 768 - protein, 407 aa, Zea mays
  misc_feature: Public GI ID no. 194693220
  misc_feature (1)..(407): Bit score of 268.3 for hmm based on sequences of FIGURE 11.
  misc_feature (49)..(226): Pfam Name: HSF_DNA-bind Pfam Description: HSF-type DNA-binding
  misc_feature: Functional Homolog Of SEQ ID NO. 364
MGSKKRSPQHPASPAGGEVGAQAAGKATPVTAAPETAPVAVVPKPPDVAPFLTKVYDMVSDPATDAVISWSAGGGSFVIWDSHVFERDLLPRHFKHNHFTSFIRQLNTYGFHKVDPDRWEWANEGFIKGQKHLLKTIKRKKKSSQDVPSDLQSVPVKTAPGTENIEIGKYGGLEKEVETLKRDKALLMQQLVDLRQYQQTSSLEVQSLIQRLRVMEQNQQQMMALLAIVVHNPDFLNQLVQQQCRSNWWNDDGNRKRRFQALEHGPVDDSETSGGGAQIIQYCPPVPETSNQPTPANEAFCSSPVQSVSSHALEMPMDVEMASNNVGTLDSTGNDFTDTSALCEWDDMDIFGGGLEHILQQTEQDFQVDPLTIEDYGYDRPWLEQDCQVEAQQNCKNPQYADVITEA

SEQ ID NO: 769 - protein, 408 aa, Zea mays
  misc_feature: Public GI ID no. 194708220
  misc_feature (1)..(408): Bit score of 262.2 for hmm based on sequences of FIGURE 11.
  misc_feature (49)..(226): Pfam Name: HSF_DNA-bind Pfam Description: HSF-type DNA-binding
  misc_feature: Functional Homolog Of SEQ ID NO. 364
MGFTKRSPQHPASPAGGEVGAQTAGKVTPVPAAPESAPAAVVPRPPDVAPFLTKVYDMVSDPATDAVISWSAAGGSFVIWDSHAFERDLLPRHFKHNHFTSFIRQLNTYGFHKVDPDRWEWANEGFVKGQKHLLKTIKRKKKSSQDVPSDLQSVPVKTAPGTENIEIGKYGGLEKEVETLKRDKALLMQQLVDLRQYQQSSSAEVQNLIQRLRVMEQNQQQMMALLAIVVQNPDFLNQLVQQQRRSNWWNDDGNRKRRFQALEHGPVDDQETSGGGAQIIQYRPPVPETSNQPIPANEAFYSTPAQPASSPALEMPMDVEMASNNVNTFDSTGNDFTDTSALCEWDDMDIFGDELEHILQQPEQDFQVDPPLTVEDYGYDHPRLEQDCQMEAQQNCKNPQYADVITEA

SEQ ID NO: 770 - DNA, 898 bp, Gossypium hirsutum
  misc_feature: Ceres CLONE ID no.1845154
  misc_feature: Encodes the peptide sequence at SEQ ID NO 771
tcgttgtttcctccttcccttctatcctctcatcccctcttccctttaataagaggcttcttttctgataattctttgctttgttcatagtttcccttcaaaattcagagatcttgcagatctgattttcaaaaataaaaaattaaaggcaaatatcaagagatttcgaagaaaaacaagaaaagatggcggaggaacatagatgccaagcgccggaaggtcaccgtctttgtgttaataactgtggtttcttaggaagtccggcgacgatgaatctttgttctaaatgttacagagatttccgtcttaaagaacaacaacaagcttcttcggctaaatcgtctatctctacctctccttcatcttcgtcaactgcagtcgaatctgtttctcaggtacctctcctgactctccctgaagtcaaaggagttccgccggttgtttcggctgtcgcgatctctccggtgacggaacagaaaccacaacagcaacagcaacaacaacaacaaccgactcggtgcacggtttgcaggaaacgggtcgggttgaccggattcaagtgcaagtgcgggattacgttttgcgggtcacacaggtacccggaaaatcatggatgcacgttcgatttcaagaagattgggcgagaggagattgcacgtgccaatcccgtggtcaaagcagagaagatcgtgaggatttgagaagaagaagatggaaagccgatcgatcctttgacttttaatgagtaaaagaaaaagagaaatagaaattgtcaaactcgttaagattgcgacacgtgtttcggtgttggtccccatacctttaaaaattgggcttggataaaaatattttatcttataaaataagtcttctattttaaaaaaaaaaaaaaaaaaaa

SEQ ID NO: 771 - protein, 171 aa, Gossypium hirsutum
  misc_feature: Ceres CLONE ID no.1845154
  misc_feature: Bit score of 368.8 for HMM based on sequences of FIGURE 7.
  misc_feature (112)..(152): Pfam Name: zf-AN1 Pfam Description: AN1-like Zinc finger
  misc_feature (13)..(37): Pfam Name: zf-A20 Pfam Description: A20-like zinc finger
  misc_feature: Functional Homolog Of Ceres SEEDLINE ID no. ME04477 at SEQ ID NO. 742
MAEEHRCQAPEGHRLCVNNCGFLGSPATMNLCSKCYRDFRLKEQQQASSAKSSISTSPSSSSTAVESVSQVPLLTLPEVKGVPPVVSAVAISPVTEQKPQQQQQQQQQPTRCTVCRKRVGLTGFKCKCGITFCGSHRYPENHGCTFDFKKIGREEIARANPVVKAEKIVRI

SEQ ID NO: 772 - DNA, 1104 bp, Populus balsamifera subsp. trichocarpa
  misc_feature: Ceres ANNOT ID no.1504999
  misc_feature: Encodes the peptide sequence at SEQ ID NO 765
atgacaaaccagaatgtggttgtgcctaatgccagaaaaggtgttgatatcaccatcacaatggccctgtccaagtctctgttttcacctgttgtgccgaagccattgccagctgctcctggtgggtatttcacaatatcccggaagatgttcgcaaagaagactgaaactggaggcaaaaccaattcctgggctgattctatgagagattcttcacctacccgtgtcaaatccactacgtctttatcagaaatcgaggagaaaaatacttggattgtaaatcatccttctgctttgaacatgttcgagcaaatagtgaatggctcaaagggaaaacagattgtaatgtttttagattatgatggtacactgtcacccattgttgaagatcctgacagggcattcatgaccaacgagatgagagaagctgttagggacgtcgctagatactttcccactgctatagtgacgggaaggtgtagggataaggtgtacagcttcgtaagattggcagggctttattacgctggtagccatggcatggacatcaagggaccatccaagaattgttgcagaaacaaaaaagattatcaaggtgtactttttcaacctgccagtgattttttacccatgattgatgaggtgtacaatgctttgctggagagaacaaagtatatcccaggggctagagtagaagacaacaaattttgcatatccgtacactttcgttgtgtcgaggaaaagatgtgggctgcattagtagagcaagtaagatcagttctcaatggttatccaaaacttcgattaactcaagggaggaaggttttagagatccgacccaccattaaatgggacaagggcaaagctcttgagttcgtgttggaatcattaggatatgccaattctactgatgttttaccagtttatattggagatgatcgaactgatgaggatgcattcaaggttctaagaaacaggggacaagggcttgggattcttgtttctaaagttcccaaggaaacaaatgcctcgtattctctacaagagccaacagaggcaagagatctgtggtctcttctttatttcctcgacgccaagaaatag

SEQ ID NO: 773 - protein, 476 aa, Populus balsamifera subsp. trichocarpa
  misc_feature: Ceres ANNOT ID no.1456402
  misc_feature: Bit score of 670.5 for HMM based on sequences of FIGURE 9.
  misc_feature (127)..(361): Pfam Name: Trehalose_PPase Pfam Description: Trehalose-phosphatase
  misc_feature: Functional Homolog Of Ceres SEEDLINE ID no. ME20095 at SEQ ID NO. 1129
MRPSRPSCGKMTNQNVVVADTNSGLNLAITVHVTNSSIFTTAAQKPPAAPGGYISISRKKLLKNLEINGGARINAWVDSMRASSPTHIKSTPSVNEDQSSWILHHPSALEMFEQIIDASKGKQIVMFLDYDGTLSPIVDDPDKAFMSKQVMRATVRKLARFFPTAIVSGRCRDKVYNFVRLAELYYAGSHGMDIKGPAKGSKYKKGGDGVVFQAASEFLPMIDEVYEELVEKTKTTPGAKVENNKFCLSVHYRCVDEKKWSGLAQVVKSVLKEYPKLRLTQGRKVLEIRPTIKWDKGKALEFLLESLGFANCTDVFPVYIGDDRTDEDAFKVLRERGQGFGILVSKIPKDTSASYSLQEPTQASYGFLATFGGVETAGLSRAVKGGVKSSGKIETVQIYPPLQEIVIKATAAWHALAQTHLHVLGTSNRKQSPKFFTNDACKRKVLEPTVASFVNIPLLIISKATPARRLRKGGIV

SEQ ID NO: 774 - protein, 408 aa, Zea mays
  misc_feature: Public GI ID no. 194689430
  misc_feature (1)..(408): Bit score of 257.9 for hmm based on sequences of FIGURE 11.
  misc_feature (49)..(226): Pfam Name: HSF_DNA-bind Pfam Description: HSF-type DNA-binding
  misc_feature: Functional Homolog Of SEQ ID NO. 364
MGFTKRSPQHPASPAGGEVGAQTAGKVTPVPAAPESAPVAVVPRPPDVAPFLTKVYDMVSDPATDAVISWSAGGGSFVIWDSHAFERDLLPRHFKHNHFTSFIRQLNTYGFHKVDPDRWEWANEGFVKGQKHLLKTIKRKKKSSQDVPSDLQSVPVKTAPGTENIEIGKYGGLEKEVETLKRDKALLMQQLVDLRQYQQSSSAEVQNLIQRLRVMEQNQQQMMALLAIVVQNPDFLNQLVQQQRRSNWWNDDGNRKRRFQALEHGPVDDQETSGGGAQIIQYRPPVPETSNQPIPANEAFYSTPAQPASSPALEMPMDVEMTSNNVDTFDSTGNDFTDTSALCEWDDMDIFGDELEHILQQPEQDFQVDPPLTVEDYGYDHPRLEQDCQMEAQQNCKNPQYADVITEA

SEQ ID NO: 775 - protein, 531 aa, Vitis vinifera
  misc_feature: Public GI ID no. 157346270
  misc_feature (1)..(531): Bit score of 183.5 for hmm based on sequences of FIGURE 11.
  misc_feature (98)..(265): Pfam Name: HSF_DNA-bind Pfam Description: HSF-type DNA-binding
  misc_feature: Functional Homolog Of SEQ ID NO. 364
MNPRDNPYLDRKESPPPPYQSEAPAAEAVQPKTEPFSVGSQPFPSGSPLLQIRPISSLEPPFSGEPIVTVGVAAEAEAEAEEIGAPQPLDCLQDNPIPPFLSKTFDIVDDVLLDPIVSWGPTGESFVVWDPVEFSRLVLPRNFKHNNFSSFVRQLNTYGFRKIDSDKWEFANEGFMRGKRHLLKNIRRRKSPQSQHTGSYAGPSSEIAMSGLESEVERLRKQKSLLMQEVIELQQQHSGTIHQMEVVNERIQAAEKRQKKMVSFLAKLLQNPEFLARLLPKDDQKDIGVPRMMRKFVKHQKLEPGKSDSSMGGQIVKYRPGSENLITSSLFPPSNPDSCEQFPNDCLQVIAGKLDLGMESVPFGTRKVSSDELAAVAHKLIEAPEQVREETASLGPVGLVFKGKNLVSSQPEGSTNYNLSFIDDSTKEKAFPEFLSPGIDGIIKQADIWSMGFDDSADMTSSCGELWGNVTNYDVPDLGLTGGISDIWDLGSLQAAEGLGIDKWPSDESTFNEPENQADQPKDYTSKNTYP

SEQ ID NO: 776 - DNA, 1892 bp, Triticum aestivum
  misc_feature: Ceres Clone ID no. 925997
  misc_feature: Encodes the peptide sequence at SEQ ID NO. 777
tttgaggccacgcgcccggcgcgcgatctagaaccttccacagccttcccgacgcctcccgacgcgcgcgcactgtacggacgggtatttagcactgcggccgccactccaccccgccgcccgacgaaattcacccaccgtctccctcatttctttacccacccgcccaccatttctttaccacacgacaaagatctatcccgccgccttcgattccacccgagatatcccgcgattccagccgagcttcagcgggagcagagttggcgggggtcatggaggcggcggtggcggggggcgttgtgaaggaggaggagctgctgctgcacgaggagcagccgccggcggggccgcagcagcaggacggggcgctgccgcggccgatggaggggctgcacgaggccgggccgccgccgttcctcaccaagacgtacgacctggtggaggacccggccacggaccaggtcgtgtcatggggccgcgccggcaacaccttcgtcgtctgggacccgcacgtcttcgccgaggcactgctcccgcgcctcttcaagcactccaacttctccagcttcgtccgccagctcaacacctatggattcagaaaggttgatcctgacagatgggagtttgcaaatgaaggtttccttaggggtcagaggcatcttctcaagatgatcaagagaaggaagccgccatccaacgcgccctcatcgcagcagcaggccctcacatcttgcctggaggttggcgagtttggatttgaggaagagattgacaggctcaagcgcgacaagaacctcttgatcacagaggtagtgaagctaaggcaggagcagcaagctactaaggataacgtgcaagccatggaaggcaggctacgagctgctgaacagagacaggcccagatgatggggttcttggcaagagcaatgcgtaacccacacttcttccaacaattagtccagaagcaagataagaggaaggagcttgaggatgccatctcgaagaaaagaaggcggcctatagacaatgctccattttatggtcccgcggcgacaacaagtcagagcgagcaacttgattcacagttcctgtttgattctggtgtcctcagtgaacctggaatgaatgggatggagaatttagcgcagaacattcaggagcttgggcagggcaaaacagacgaggagaagaaggatgaagctaatgggcagttggatatcaacaacgatttctgggcagagctattttctgatgattttggagacggagacgggtctgggctgtcagagttggagggaaggagacctgaagatatcgacgaactggcacagcagttggggtatctgagttctactagcccgcagtagagttttgttcacagtggttcacttcaaccaacaaacattgcttcttcagtactactattgcagatcatcttgaacaacctgatttagttgattggtggcaacatgactggctatctgaggtgttccataccggagattggaccgtgttgatggcacctctgggtagagagtagaagctgaagactaattgctgcgtcgcttgatggagacccatgacgtgtattgaatgggtacctaaactcgcaactctgaagaagatggtccagatcgtcgacattcggttggtcttgagctggtgttcagcagcagtagctgtggaagtgtgttactgtatatactcgttgggtgaagttttgttgtggaagtctggtctgtagtcagccgttggcatctgggtgtgggtttacccatttctcctgctgctgtccatttgccaatttaccttacttttagggcctgtgtcctgtgtgatgattggtagtgtatgctggaacctctgttatattgagataataaatgttc

SEQ ID NO: 777 - protein, 364 aa, Triticum aestivum
  misc_feature: Ceres Clone ID no. 925997
  misc_feature (1)..(364): Bit score of 728.3 for hmm based on sequences of FIGURE 11.
  misc_feature (46)..(215): Pfam Name: HSF_DNA-bind Pfam Description: HSF-type DNA-binding
  misc_feature: Functional Homolog Of SEQ ID NO. 364
MEAAVAGGVVKEEELLLHEEQPPAGPQQQDGALPRPMEGLHEAGPPPFLTKTYDLVEDPATDQVVSWGRAGNTFVVWDPHVFAEALLPRLFKHSNFSSFVRQLNTYGFRKVDPDRWEFANEGFLRGQRHLLKMIKRRKPPSNAPSSQQQALTSCLEVGEFGFEEEIDRLKRDKNLLITEVVKLRQEQQATKDNVQAMEGRLRAAEQRQAQMMGFLARAMRNPHFFQQLVQKQDKRKELEDAISKKRRRPIDNAPFYGPAATTSQSEQLDSQFLFDSGVLSEPGMNGMENLAQNIQELGQGKTDEEKKDEANGQLDINNDFWAELFSDDFGDGDGSGLSELEGRRPEDIDELAQQLGYLSSTSPQ

SEQ ID NO: 778 - DNA, 1963 bp, Panicum virgatum
  misc_feature: Ceres Clone ID no. 1862704
  misc_feature: Encodes the peptide sequence at SEQ ID NO. 779
ctcgccacccaaatattccgcggagaacccacccactcgctgcctgcaatcgcctccccatccccacccccccgcgcgggcctcctaaccctagtcctcgtcccgtccccccatggcggcgtgaacggccgccgtacggatcgcgcgggatatgcagggcggtgtcgcggctgctgccgctgctgctgcggcggccgcggcgacggtgaccacggcggtggcgcctccagtggccccggcccctgcggccgcgaccgctcacgcggcggtgggtaacggcggggcggccaccgcgccgccgccgcccttcctcatgaagacctacgagatggtcgacgacccggccacggacgacgtcgtgtcctggggccccgggaacaacagcttcatcgtctggaacacgcccgagttcgccagggacctcctgcccaagtacttcaagcacagcaacttctcctccttcgtcaggcagctcaacacatatgggtttagaaaggttgatccagacagatgggaatttgcaaatgagggttttctgagaggacaaaaacatctattgaagactatcaacagaaggaaaccatcgttgcaggggaacagccagccgcagcagccccaattgcagaacgctcctttgccagcctgtgttgaggtcggtaaatttgggctggaggaagagatagaacggctgaaaagggataagaatgttcttatgcaagagcttgtcaggctgagacagcaacagcagacaactgaccatcagctgcagactttggggaagcgtcttcaagggatggagtcacggcagcaacagatgatgtctttcctggccaaagcaatgcaaagtcctggtttcctagcacagttcgtacagcaaaatgagaacagcaggaggagaatagtagccgtgaacaagaagaggaggctgcccaagcaagatgacggcctagactctgaaagtgcttctgcctcattggacggtcaaattgtcaagtatcagcctatgatcaacgaagctgccaaagcaatgctgaggaagatcctaaagctagatgtttcacatagatttgaatctgtgggcaattcagataattttctactggagaattatctgccagccgctcaaggttttgacagctcttcgtcgaccagaaattctggagtaacccttgcagaggttccagctaactcaggtttgccgtatgtggctgcgagctctgggctttcagctatctgttcgtcttcagtggctcctgaaatccagtgtccagttgttttggacaacagctcatccaaccaagttcccaacatgagtgttgtgcctcctgtttcaaagcctatagcaccagggagtgatatcactattccggaattcccagatctggctgacatagtatctgatgactctgatattcctggaggaccctttgggatgcctggacctgagtttcccctggccgaagagggtgatgacagtgtccccatcgagactgatgagattttgtacaatgatgagactcagaagctgccagcaattgtcgattccttctgggagcagttcctggttggcagccctctatctgttgataacgatgaagttgattcaggtgtactagatacaagggagacactaccggagaatggatggaaaaaagtggagcacgtggctaaccttacggaacagatgggccttctatcaccaaatcacagggggtgagatgtattatcctaaggtaggctggtaataagctttggaagcgtcgcctgccctttttgttaatgtttaagattgtccttattgctgaaatgatatgctgatatatcaaccactcaacctatatgcggggggattcaatgttccacccatgaatgatcttggtacgctccaggaattcacctgcttgtatctaggtttggcaggcttgagaacagaacaatggtaacttgtcaaatctgcatgatc

SEQ ID NO: 779 - protein, 521 aa, Panicum virgatum
  misc_feature: Ceres Clone ID no. 1862704
  misc_feature (1)..(521): Bit score of 557.6 for hmm based on sequences of FIGURE 11.
  misc_feature (51)..(226): Pfam Name: HSF_DNA-bind Pfam Description: HSF-type DNA-binding
  misc_feature: Functional Homolog Of SEQ ID NO. 364
MQGGVAAAAAAAAAAAATVTTAVAPPVAPAPAAATAHAAVGNGGAATAPPPPFLMKTYEMVDDPATDDVVSWGPGNNSFIVWNTPEFARDLLPKYFKHSNFSSFVRQLNTYGFRKVDPDRWEFANEGFLRGQKHLLKTINRRKPSLQGNSQPQQPQLQNAPLPACVEVGKFGLEEEIERLKRDKNVLMQELVRLRQQQQTTDHQLQTLGKRLQGMESRQQQMMSFLAKAMQSPGFLAQFVQQNENSRRRIVAVNKKRRLPKQDDGLDSESASASLDGQIVKYQPMINEAAKAMLRKILKLDVSHRFESVGNSDNFLLENYLPAAQGFDSSSSTRNSGVTLAEVPANSGLPYVAASSGLSAICSSSVAPEIQCPVVLDNSSSNQVPNMSVVPPVSKPIAPGSDITIPEFPDLADIVSDDSDIPGGPFGMPGPEFPLAEEGDDSVPIETDEILYNDETQKLPAIVDSFWEQFLVGSPLSVDNDEVDSGVLDTRETLPENGWKKVEHVANLTEQMGLLSPNHRG

SEQ ID NO: 780 - DNA, 1749 bp, Populus balsamifera subsp. trichocarpa
  misc_feature: Ceres ANNOT ID no.1456402
  misc_feature: Encodes the peptide sequence at SEQ ID NO 773
atggtgtggtgttggtgttttcatgagagggagggatcggaggtgggctgtaaattgtttatgcatccaaagccaaaggtgcaggtggatgacgagttggtggggctggcatctagtatttacacgtggcgggaatccaccatagtcaagtcaaccaaagaatgtcttccacgtacacaaactactagctggcaaggaagttatggtccttatggaagacggctaggggccaaagccgcatgtgggtccacttcaggatttcgggtgctgggccagttctgtgggtcccgcagtttagagtttactaggagagggtgcatgaggccctcgcgtccgtcttgtggaaagatgacaaaccaaaatgtggtagtggctgatacaaactctggactcaacttggcaatcacagtgcatgtaacaaactcctctatcttcacaacggcggcccagaaacctccagcggcaccaggtggttacatatccatttctagaaagaaactcttaaagaatctggaaatcaatggaggagcaagaattaatgcttgggttgattccatgagagcctcatctcctactcatatcaagtccacgccttctgttaatgaagaccaaagctcatggattcttcaccacccatcagcactggagatgtttgagcagataattgatgcctctaaaggaaagcaaattgttatgttcttggactatgatggcacactttctcctattgttgatgacccagataaagctttcatgtccaagcaggtgatgagagcaacagtgagaaagcttgcaagatttttccctactgcaatagtgagtgggaggtgcagagacaaggtgtataactttgtacggttagcagaactgtactatgctggaagccatggcatggacattaaaggaccagcaaaaggctccaaatacaagaaaggcggtgatggtgttgtctttcaggctgccagtgaatttcttcccatgatagatgaggtttacgaagaattggtagagaaaactaaaacaactccaggggccaaggtggagaacaacaaattctgcctctctgtgcactatcgctgcgttgatgagaaaaaatggagtggactggcacaagtagttaagtcagtgttgaaggagtacccaaagcttcgacttactcaaggaagaaaggttttagaaatccgccctaccattaaatgggacaaaggaaaggctcttgaatttttgttagagtcacttggattcgccaattgcactgatgtttttcctgtttacattggagatgatagaacagacgaagatgcatttaaggtactaagagagagaggacaaggttttggtatcttggtctctaaaatcccaaaggacactagtgcatcttattccctacaggaacccacccaggcaagttatggatttcttgcgacgtttggtggagtggaaacggctggcctttcaagggcggtcaagggtggtgtaaagagtagtgggaagattgagacagtacagatatacccaccccttcaagaaattgtaattaaagccactgcagcttggcatgctttagctcaaacacacttgcatgtgcttgggacctcaaatcgcaaacaaagccccaaatttttcacaaacgatgcttgtaagagaaaggtccttgagcccacggttgccagctttgtgaatattcctttgctaataatttcgaaggctacccccgctagaaggttgaggaagggaggtatcgtgtga

SEQ ID NO: 781 - protein, 352 aa, Populus balsamifera subsp. trichocarpa
  misc_feature: Ceres ANNOT ID no.1496359
  misc_feature: Bit score of 651.8 for HMM based on sequences of FIGURE 9.
  misc_feature (97)..(329): Pfam Name: Trehalose_PPase Pfam Description: Trehalose-phosphatase
  misc_feature: Functional Homolog Of Ceres SEEDLINE ID no. ME20095 at SEQ ID NO. 1129
MVLPKSLFSPVVPKPLPAAPGGYFTITRKRFSKKTETGGKISSWVDSMRDSSPTRVKSTTSLSETEEKNSWIVNHPSALNMFEQIVKGSKGKQIVMFLDYDGTLSPIVEDPDRAFMTNEMREAVRDVARYFPTAIVTGRCRKKVYSFVRLAGLYYAGSHGMDIKGPSKNNCKYEKGGVLFQPASEFLPMIDEVYNVLLERTKSIPGAKVENNKFCVSVHFRCVEEKMWAILVEQVRSVLNDYPKLRLTQGRKVLEIRPTIKWDKGKALEFLLESLGYANSTDVFPVYIGDDRTDEDAFKVLRNRGQGLGILVSKVPKETNASYSLQEPKEVKDFLRRLVEWKRSSLQGQRRA

SEQ ID NO: 782 - DNA, 877 bp, Gossypium hirsutum
  misc_feature: Ceres Clone ID no. 100059286
  misc_feature: Encodes the peptide sequence at SEQ ID NO. 783
tcgaaatgaagtgaagtgaaaacgaagtctcaaatggaaggagttgtagtaaaagaagaggaaactcaaatgacgtttgcaacagctgttgggactactgctgggttgtcttcatcttcatcgtcatcaaatgttactcctcagccgaaggaagggcttaacgaggttggtccgccgccgttcttgactaaaacttttgatatggtggaagacccttcgacggattcggtggtttcatggagtgaagctcgtaatagtttcattgtttgggattctcataaattttcaaccacgttgcttcctaggcacttcaagcacaacaatttctccagtttcattcgtcagctcaatacatatggttttagaaaagttgatccagatcgatgggaatttgccaatgaagggtttttaggagggcaaaagcagctacttaaaacgattaagaggagaaggaacatagtgcaaagctcacagcatcaagctggaggaggaggagcttgtgttgagttaggacaatttggattagatgaagaactggagagattaaagagggatcgaagtgttttactagctgaaatcgtgagattaagacaacaacagcagcattcaagggaccagattgttgcaatggaggataggttacagagcacagagaagaaacagcaacagataatgtcgttccttgctaaggcacttcgaaacccgactttcatacagcaacttgctcagaacagacaggctaaaggcgtcgaaatcggacgaaaacggaggctcacggcgagccccagtgtggagaatttacaacaagcagcagtccctgtggtggttgataatgatcaagttgaggaacaagaaggattggcaactattgagactg

SEQ ID NO: 783 - protein, 281 aa, Gossypium hirsutum
  misc_feature: Ceres Clone ID no. 100059286
  misc_feature (1)..(281): Bit score of 471.8 for hmm based on sequences of FIGURE 11.
  misc_feature (48)..(217): Pfam Name: HSF_DNA-bind Pfam Description: HSF-type DNA-binding
  misc_feature: Functional Homolog Of SEQ ID NO. 364
MEGVVVKEEETQMTFATAVGTTAGLSSSSSSSNVTPQPKEGLNEVGPPPFLTKTFDMVEDPSTDSVVSWSEARNSFIVWDSHKFSTTLLPRHFKHNNFSSFIRQLNTYGFRKVDPDRWEFANEGFLGGQKQLLKTIKRRRNIVQSSQHQAGGGGACVELGQFGLDEELERLKRDRSVLLAEIVRLRQQQQHSRDQIVAMEDRLQSTEKKQQQIMSFLAKALRNPTFIQQLAQNRQAKGVEIGRKRRLTASPSVENLQQAAVPVVVDNDQVEEQEGLATIET

SEQ ID NO: 784 - DNA, 2323 bp, Zea mays
  misc_feature: Ceres Clone ID no. 1577511
  misc_feature: Encodes the peptide sequence at SEQ ID NO. 785
gaggaatccattcccaatttgcgttcccactcccaccaccgcttcttcccgtatcccttgtcctccctaatttcctctcacaaaaagcgggtgcggcgtcctgccactcacctcggtctcggggggcgccgtgcggcgggcgcccgtgctgctggtttcgctccaggggagaaggggcagagggagtagagcaggttaggtccgtttgcgttttcttttgcgggtttgtaggtcaaaagctcggcgagcactttccgctccacctcctcacgctcggaatcaaatcgatgccccccctgatttggttcctggtatcggtgcatgagcttgctccaagagatctcccttttggttcggcgtcaggggttctgtgaggtcacgcggcttcttcctcttggcgctcctcacatgtccgggcgcttcgatctctgcccactgcgcgagtgattctgctgctgcagcagctgttaggtgcgcgcggtccgttatggggtgaaccgaagcgttcctcgcagggctgtgggtttattacgccgcctgtttgcttccccgctccatgtccttgtgcccatgcttctttgcttttgtcacgcctgaaccgtgtcttcttgtagtatctgaggcttggcagttggcaagtacaaactagcaacttgcttaggtataaagtataaaccagtgtctggtgcagagcccaaaggggtcacgaatcgttgatgcatagatctgcttctggctgagataaggctctaagttcgctctgttgatggggctaccatgagccacgggaacgggatgttgaattctgtcaaggtggagaggtggccagcagcagtcgctgcaaatggccagcctaggccgatggatgtgctccacgacggcagctcgccgccgttccttaccaagacgtatgacatggttgatgacccaaccacgaacgccgttgtgtcatggagtgccgccaacaatagctttgtagtttgggatcctcatatctttgggacggtgctgctgccaaggtacttcaagcacaacaacttctccagctttgttcggcagctcaatacttatggcttcagaaaggtggatcctgacagatgggaatttgctaatgaggagtttctgagaggtcagaggcacctcctcaaaaacattaggcgtcggaaacctccacactcatctccaaatcaacaatctcttggctcttacctcgaggtaggacactttggatatgaagaagagattgatcagctgaagagggataaacagctcttgatggctgaggtagtgaagctgaggcaggagcaccaaaatactagatcagatctacaggccatggaagagaaattacaagataccgagcagaagcagcagcagatgatggcattcatggcacgcgtcatgcagaaccctgatttcatgcgtcagctgatctcccagcgggagatgaggaaggagctcgaggatgccatctcgaagaagagaaggcgccgcattgaccagggacatgaagctggtagcatgggcactggttctagcctggagcaagggccacagggagtgtttgaaccgcaggagccggtggaatcactcgccaacggtgtgccatctgatctggagagttcgtctgttgaggcgaagggattggaggttcgacagggtgtttcttcaggtggttctgagcatctgaatggcaggccaagcggagagttaaatgatgatttctgggaggaccttctgcacgaggggggacttggtgcagatgcaggcaatgctgttggtcaggatgatatgaacatggacatggacccagatgttagcctgcctcaactgaaacaacatggacccagacattagccgctcttgtgctatcacaatggctgtgactctgtgagtatctttacagttatgctcgttatacccctgtggtgtacctgtttcgatcgtcttcgaccaaatgtcacgtcgactgcagtctccagttgttaatacagtctgttcagcacgctgatttaagtatttgggtcaagatgttcatataatcctgtggtatccagagatattatagtttgttttcgtaactgtttgcgcagagaccatgctatgttgcctgcaggctatcagtgtatttgttctaacagatcgcaacgctggtacaacgcagtgacctgccagactgggccactatgagattgtagggaaagaccagatagcttgtgtatgtaaaagctgatccatagtagcctatcatgtgcaacgctattgccctttgggatttggcatttcactgtatataacatatcatcgccgtattgccgcatcc

SEQ ID NO: 785 - protein, 359 aa, Zea mays; identical to SEQ ID NO: 348
  misc_feature: Ceres Clone ID no. 1577511
  misc_feature (1)..(359): Bit score of 414.2 for hmm based on sequences of FIGURE 11.
  misc_feature (38)..(205): Pfam Name: HSF_DNA-bind Pfam Description: HSF-type DNA-binding
  misc_feature: Functional Homolog Of SEQ ID NO. 364

SEQ ID NO: 786 - DNA, 660 bp, Brassica napus; identical to SEQ ID NO: 722
  misc_feature: Ceres Clone ID no. 1075098
  misc_feature: Encodes the peptide sequence at SEQ ID NO. 787

SEQ ID NO: 787 - protein, 125 aa, Brassica napus
  misc_feature: Ceres Clone ID no. 1075098
  misc_feature (1)..(125): Bit score of 198.4 for hmm based on sequences of FIGURE 6.
  misc_feature: Functional Homolog Of SEQ ID NO. 711
MPIGFRNQVMRSFSWIIIPLLLLLFCLIGSSQAADEKSSGDVCNTVSDPGGCPINCFRADPVCGADGVTYWCGCPDAACHGARVVKTGACDAGNAGSASVPGQALLLIHIVWLFLLGLSLLVGAF

SEQ ID NO: 788 - DNA, 1619 bp, Zea mays
  misc_feature: Ceres Clone ID no. 229513
  misc_feature: Encodes the peptide sequence at SEQ ID NO. 789
gccaaatcgaaggagattgaacgaagcagcccagccaaattcccctcgccgccccgtcccttctcgacatttcttgtcccgtcgtcgcctcaatctcgaagcctctccggcggagccgcctcatcatgttccgaaggcctccaaccaaacatcctctagggtttccgcatcgtccgtcgcgatgggcttcacgaagcggtcgccccagcatcccgcctccccagccggcggcgaggtcggcgcccagacggcagggaaggtcacaccagtgccggcggcgccggagtcggcgcccgcggcggtggtgccgaggcctccggacgtggcgcccttcctgaccaaggtctacgacatggtctccgacccggccaccgacgcggtcatctcctggagcgccgccggcggcagtttcgtgatctgggactcgcacgctttcgagcgcgacctgctgccgcggcacttcaagcacaatcacttcaccagcttcatacgccagctcaacacctacggatttcataaagttgatccagatagatgggaatgggccaatgaaggctttgttaagggccaaaaacatcttttgaagaccatcaagagaaagaagaaatcctctcaggatgtacctagtgatctgcagtcggtgcctgtcaaaactgcacctggcactgagaatatcgagataggaaaatatggaggccttgaaaaggaggttgagacacttaagagggacaaggcccttctaatgcagcagcttgtagatctacggcagtaccagcaatcatctagcgctgaagtgcagaatttaattcaacgcctccgtgtgatggagcagaaccagcagcagatgatggcacttttggcaattgttgtccagaatccagacttcctgaaccagctcgtgcagcagcagcgcaggagtaactggtggaatgatgatggtaacaggaaaagaaggttccaagctctggaacatggtcctgtagatgaccaagagacttctggtggaggcgcacaaattattcaatatcgtcctcctgttcctgaaacttccaatcagccaataccagcaaatgaagctttctattcaacccctgcacaaccagcttcaagccctgcacttgagatgcccatggatgtagagatgacttcaaacaatgttaatacctttgattcaactggcaatgattttactgacacctctgctctatgtgaatggtatgacatggatatatttggtgatgaacttgagcacattcttcaacagccagagcaggactttcaagtggaccctcctttaacagttgaggattatggttatgatcatccacggttagagcaggactatcagatggaagcacaacagaattgcaaaaatcctcaatatgttgcctgtgtcttgaagcaaagggaaagccatgcatctgatgtccattagtactgatcagtttgagctgatgtcataactgaagcatgagcggtggtcccccagaatgttgtccagtaacattagtggatagagatttgtgatgaacagaatcttgagactggcaggttagccaccattgggaacctgaagaccgtcgggattgctcagaattcagtatactaatactaatact

SEQ ID NO: 789 - protein, 417 aa, Zea mays
  misc_feature: Ceres Clone ID no. 229513
  misc_feature (1)..(417): Bit score of 260.0 for hmm based on sequences of FIGURE 11.
  misc_feature (49)..(226): Pfam Name: HSF_DNA-bind Pfam Description: HSF-type DNA-binding
  misc_feature: Functional Homolog Of SEQ ID NO. 364
MGFTKRSPQHPASPAGGEVGAQTAGKVTPVPAAPESAPAAVVPRPPDVAPFLTKVYDMVSDPATDAVISWSAAGGSFVIWDSHAFERDLLPRHFKHNHFTSFIRQLNTYGFHKVDPDRWEWANEGFVKGQKHLLKTIKRKKKSSQDVPSDLQSVPVKTAPGTENIEIGKYGGLEKEVETLKRDKALLMQQLVDLRQYQQSSSAEVQNLIQRLRVMEQNQQQMMALLAIVVQNPDFLNQLVQQQRRSNWWNDDGNRKRRFQALEHGPVDDQETSGGGAQIIQYRPPVPETSNQPIPANEAFYSTPAQPASSPALEMPMDVEMTSNNVNTFDSTGNDFTDTSALCEWYDMDIFGDELEHILQQPEQDFQVDPPLTVEDYGYDHPRLEQDYQMEAQQNCKNPQYVACVLKQRESHASDVH

SEQ ID NO: 790 - DNA, 1077 bp, Sorghum bicolor
  misc_feature: Ceres Annot ID no. 8666698
  misc_feature: Encodes the peptide sequence at SEQ ID NO. 791
atggcgcggagcgtggccgtggcggcagtgaagctggagccgaagccggagccgtgggcggcgggcgcagaggaggcgtcgtcagtggtgccgcggtcgatggaggggccgccgctccctgcgccgttcgtgtcgaagacgtacgagatggtggcggacgcggccacggacgccgtggtgtcgtgggcgcccggcggcgcggggaacagcttcgtggtgtgggacccgcgggcgctcgccgccggcatcctcccgcgcttcttcaagcacgccaacttcgcgtccttcatcaggcagctcaacatctacggattcaggaaggtgaatccggatcgttgggagtttgcaaacgaatccttcttagcaggccagaagcatttgctgaaaaatatcaagaggaggcgtgcttccaagcctcagatggaagcaaagccaagaaactgtgctggtgcttgtctcggttcgccgaaggatcccagcgaggtcgagagtttgaaacgagaccgcgcagcgctcagggccgaagtcatcacgctaaggcagcagtacaacatctgcaaatcccaactcgtcgccttggaggagaggatcctgaacaacgagaggaaccagcagagggccatcgccttcttcgcaaaggtgctcagcaacccaggtttcgtgcagcaggtcctgctcaactatgccaaggagaaagaactacgtggcgcttccaaaagacagcggctgatggaaaacgaagaacatcggcacggcgatttgccactgaggagtggcaccgaagctgcgtttgcgacagtggcggctggcgttggcgtctctgcggggagcagccatggtggcacagccgcgaaacaggagcctgggcctgagttgaatggtcaggagatggacagtatttggtatgatgtgtgggacgagctggacgcgataccaggcgctgaaatggaccggcgagaagcagacaagggcgtggctggcttcgacgtcgaggatttcagtggacggccttgcggttgggatgatgactgctcgtatctcgcggagccgatgcagtttgtggagcactatgactag

SEQ ID NO: 791 - protein, 358 aa, Sorghum bicolor
  misc_feature: Ceres Annot ID no. 8666698
  misc_feature (1)..(358): Bit score of 194.4 for hmm based on sequences of FIGURE 11.
  misc_feature (40)..(210): Pfam Name: HSF_DNA-bind Pfam Description: HSF-type DNA-binding
  misc_feature: Functional Homolog Of SEQ ID NO. 364
MARSVAVAAVKLEPKPEPWAAGAEEASSVVPRSMEGPPLPAPFVSKTYEMVADAATDAVVSWAPGGAGNSFVVWDPRALAAGILPRFFKHANFASFIRQLNIYGFRKVNPDRWEFANESFLAGQKHLLKNIKRRRASKPQMEAKPRNCAGACLGSPKDPSEVESLKRDRAALRAEVITLRQQYNICKSQLVALEERILNNERNQQRAIAFFAKVLSNPGFVQQVLLNYAKEKELRGASKRQRLMENEEHRHGDLPLRSGTEAAFATVAAGVGVSAGSSHGGTAAKQEPGPELNGQEMDSIWYDVWDELDAIPGAEMDRREADKGVAGFDVEDFSGRPCGWDDDCSYLAEPMQFVEHYD

SEQ ID NO: 792 - DNA, 1179 bp, Sorghum bicolor
  misc_feature: Ceres Annot ID no. 8742950
  misc_feature: Encodes the peptide sequence at SEQ ID NO. 793
atggagcgcccagccgtgacggttaagcaggaggaggacgacgacgatgtggtagtggtgttagacgccgacggcgacgctgctggcgggcactggccgggagccgccggcgcggcgccggcgccggcgccggagccttggcagacgccggcggggtccgcggttccgccgttcctggcgaagacgttcgagcttgtggaggacccggcgacggacggcgtgatctcgtggggcgccgcgcggaacagcttcgtggtctgggatccacacgccttctcggcggggcaccttccccgccgcttcaagcacggcaacttctccaccttcctccggcagctcaacacctacgtccgtaatcacatctcaattcttatcggattccgcaaggtgagccctgacaggtgggagttcgcgcacgccgaattcctcgcggggcagcggcccctcctcgtgaacatccagcggcgccgcccgggatccacagcgtctactccgtcttcggcaggggccggcggcggcggagaccgtgataacagcgagctcaagaggctgcggcgggaccgggaggcgctggcgcgggagctgacgcggctgcggcgcgagcaggaggaggcccgcgcgcagctgctggacatggagcggcgcgtgcggggcacggagcggcggcaggagcagtgcacggcctccctggcgcgcgccgtcaggagcccggccttcctggacggcctgctggcgcgccgcggccaaggcggccgcggcggcgcgcacgtagaggccgccggcaggaagcggcggctgctcgacgctgccgcggccgcgaccgcgccggacgcagcggacgtcctcgccttcgaggagctggcgctggcagcgggcgccgaggtcgaggcggcggcgcagatttctgacgccggtaacgccacggacatgatgtggtacgagctgctcggggaggagcaggtggagatcgacgccgaggtggacgagctcgtcgcggccgcggctgccactgaggcggcggcggagccatgggcggagatggacgagaaagaggttgaggagctcgtcgcggctgcggctacagctgccactgaggcggagccgtgggcggagatggacgacgaagaggttgaggagcttgtacagcagatagactgcattggctcgacgggcccctga

SEQ ID NO: 793 - protein, 392 aa, Sorghum bicolor
  misc_feature: Ceres Annot ID no. 8742950
  misc_feature (1)..(392): Bit score of 151.2 for hmm based on sequences of FIGURE 11.
  misc_feature (56)..(230): Pfam Name: HSF_DNA-bind Pfam Description: HSF-type DNA-binding
  misc_feature: Functional Homolog Of SEQ ID NO. 364
MERPAVTVKQEEDDDDVVVVLDADGDAAGGHWPGAAGAAPAPAPEPWQTPAGSAVPPFLAKTFELVEDPATDGVISWGAARNSFVVWDPHAFSAGHLPRRFKHGNFSTFLRQLNTYVRNHISILIGFRKVSPDRWEFAHAEFLAGQRPLLVNIQRRRPGSTASTPSSAGAGGGGDRDNSELKRLRRDREALARELTRLRREQEEARAQLLDMERRVRGTERRQEQCTASLARAVRSPAFLDGLLARRGQGGRGGAHVEAAGRKRRLLDAAAAATAPDAADVLAFEELALAAGAEVEAAAQISDAGNATDMMWYELLGEEQVEIDAEVDELVAAAAATEAAAEPWAEMDEKEVEELVAAAATAATEAEPWAEMDDEEVEELVQQIDCIGSTGP

SEQ ID NO: 794 - DNA, 457 bp, Brassica napus
  misc_feature: Ceres Clone ID no. 1034279
  misc_feature: Encodes the peptide sequence at SEQ ID NO. 795
aaagagaaaggaaaaaaaaaatcaaagatctaaacaatagaagaatgatgaaraagcaagtgacaatagtggcggctcttctgattctggtggctttatcttccaatttggatatggttgctgaggctcagttaggccctggagactgctacgacggttgctccaccgcctgcgtccagcgcgactcgagaaagacgtcccgatgcgatcgcaagtgctctattcggtgtggcccaratgctaaaaaggcaggagagactggtgcttaaactttgatatttactaagatccatattttggatttaataatgttgtaatcttcgtttcaaaattttatctctgcaaaacatattacgtattgtttatgttgttattgtagtcaataaccaataattgctgctccgatgttccatttaactactagtattaccatatgtattaactttgaaatgtaatg

SEQ ID NO: 795 - protein, 74 aa, Brassica napus
  misc_feature: Ceres Clone ID no. 1034279
  misc_feature (1)..(74): Bit score of 189.2 for hmm based on sequences of FIGURE 3.
  misc_feature: Functional Homolog Of SEQ ID NO. 568
  misc_feature (3)..(3): Xaa is any aa, unknown, or other
  misc_feature (65)..(65): Xaa is any aa, unknown, or other
MMXKQVTIVAALLILVALSSNLDMVAEAQLGPGDCYDGCSTACVQRDSRKTSRCDRKCSIRCGPXAKKAGETGA

SEQ ID NO: 796 - protein, 137 aa, Gossypium barbadense
  misc_feature: Public GI ID no. 38016527
  misc_feature (1)..(137): Bit score of 230.6 for hmm based on sequences of FIGURE 7.
  misc_feature (10)..(34): Pfam Name: zf-A20 Pfam Description: A20-like zinc finger
  misc_feature (103)..(131): Pfam Name: zf-AN1 Pfam Description: AN1-like Zinc finger
  misc_feature: Functional Homolog Of SEQ ID NO. 742
MAEEHRCQAPQLCANNCGFFGSPTTQNLCSECYRGLQLKEQQSSSAKQAFNHTLVPSSSSLPSSSSARSSFSASLPAKEEPSAGTKETKVVEEEEVQVTPNRCLSCKKRVGLTGFKCRCGMVFCGIHRYPGTTCLCF

SEQ ID NO: 797 - protein, 131 aa, Brassica napus
  misc_feature: Ceres Clone ID no. 1084216
  misc_feature (1)..(137): Bit score of 212.2 for hmm based on sequences of FIGURE 7.
  misc_feature (99)..(131): Pfam Name: zf-AN1 Pfam Description: AN1-like Zinc finger
  misc_feature (25)..(49): Pfam Name: zf-A20 Pfam Description: A20-like Zinc finger
  misc_feature: Functional Homolog Of SEQ ID NO. 742
  misc_feature (128)..(128): Xaa is any aa, unknown, or other
MAQRTEKEETEFKVVLETLPTTTTPTLCSNNCGVTASPSTNNMCQKCFNASVAGIDPNPIVKRSARSVSLRSTPARAVIRPRETDPVKRDHHQQTVNRCSGCRKKVGLTGFRCRCGDLFCSEHRYSDXHEC

SEQ ID NO: 798 - protein, 173 aa, Camellia sinensis
  misc_feature: Public GI ID no. 113196593
  misc_feature (1)..(173): Bit score of 366.3 for hmm based on sequences of FIGURE 7.
  misc_feature (114)..(154): Pfam Name: zf-AN1 Pfam Description: AN1-like Zinc finger
  misc_feature (15)..(39): Pfam Name: zf-A20 Pfam Description: A20-like zinc finger
  misc_feature: Functional Homolog Of SEQ ID NO. 742
MEQNETGCQVPPDAPMLCVNNCGFFGSAATMNPCSKCHKDLMLKQQQTELAASSIGSIANGGSGSPGKEPDSAITTVHVDAGSSDSMIVSMQASHESLLNENNVIVKEVPPNRCSACRKRVGLTGFNCRCGNLFCAVHRYSDKHDCPFDYRSAAQDAIAKANPVVKAEKLDKL

SEQ ID NO: 799 - protein, 224 aa, Oryza sativa subsp. japonica
  misc_feature: Public GI ID no. 75133829
  misc_feature (1)..(224): Bit score of 391.5 for hmm based on sequences of FIGURE 7.
  misc_feature (165)..(205): Pfam Name: zf-AN1 Pfam Description: AN1-like Zinc finger
  misc_feature (18)..(42): Pfam Name: zf-A20 Pfam Description: A20-like zinc finger
  misc_feature: Functional Homolog Of SEQ ID NO. 742
MEEQQAAAAGGGGGGGGASMCANGCGFFGSEATKKLCSKCYRDQLKAAPSSPPAAPDLVANEEEEASTAAAAAADEQLALCSSGCGFFGSKETNNMCSKCYRDHLKATSPLFSSSSSPATASTTDITVPIAPATTAPTPSLKGKEEEATAAASSSAAAAAKPNRCVACRKKVGLLGFECRCGGTFCSTHRHADKHACTFDFKKSDREKIAKENPLIVAPKITKF

SEQ ID NO: 800 - DNA, 480 bp, Populus balsamifera subsp. trichocarpa
  misc_feature: Ceres ANNOT ID no.1460527
  misc_feature: Encodes the peptide sequence at SEQ ID NO 801
atggcagaagaacaacaccgatgccaagaaccacgtctctgcgtaaacaactgcggtttttttggaagcccagcaactcaaaatctgtgttctaaatgttatggtgatcttcgtcaatcacagcccctgaatcagctcctagccccatcatcatctgcttctgtttcttccttttcatccccaaccgtcgatgttataaagaaccagatagctcccgtgttggtggtggaaggtgatgaaaaaggggagtttaaggctgaacctacggttgtggttccacagcagaagccaaataggtgcttgacgtgtaggaggcgcgtagggttgacgggatttaattgcaggtgtggtatggtgttttgtggaacgcataggtacccagaacaacatgattgtgagtttgattttaagagcttaggtaaagaacagatcgctaaggctaatcctgttgttaagggtgagaagcttcaaaggatttaa

SEQ ID NO: 801 - protein, 159 aa, Populus balsamifera subsp. trichocarpa
  misc_feature: Ceres ANNOT ID no.1460527
  misc_feature: Bit score of 356.5 for HMM based on sequences of FIGURE 7.
  misc_feature (100)..(140): Pfam Name: zf-AN1 Pfam Description: AN1-like Zinc finger
  misc_feature (11)..(35): Pfam Name: zf-A20 Pfam Description: A20-like zinc finger
  misc_feature: Functional Homolog Of Ceres SEEDLINE ID no. ME04477 at SEQ ID NO. 742
MAEEQHRCQEPRLCVNNCGFFGSPATQNLCSKCYGDLRQSQPLNQLLAPSSSASVSSFSSPTVDVIKNQIAPVLVVEGDEKGEFKAEPTVVVPQQKPNRCLTCRRRVGLTGFNCRCGMVFCGTHRYPEQHDCEFDFKSLGKEQIAKANPVVKGEKLQRI

SEQ ID NO: 802 - DNA, 819 bp, Zea mays
  misc_feature: Ceres Clone ID no. 1468822
  misc_feature: Encodes the peptide sequence at SEQ ID NO. 803
gctcgctccctccctccctccctcccgcgcggatcacagaagggctcacggtcacggccggcctcccaattcgcaacctcgcctccgcctctcctcctaccccctccgaaaagcaagctccggccgggccgccaccaccaccaccgcgcgcgcgtgcacgcgctcccacacacagacagacagacagacagacagagtgagagacgcacggtggttcggggtctcccttctgccaggcgcacgaggagccatggcgcagcgcgacaagaaggaggagcccacggagctccgggcgccggagatcacgctgtgcgccaacaactgcgggttcccgggtaacccggccacgcagaacctgtgccagagctgcttctcggcgtcgaggtcgccgtcgtcccctacctcctcctcctcttccctggcgtccgcggcgtcgcagccgaggccagcagcgctcgtcgtagacgcggcagcggtggaggcgctggccgctccggcggccgcggccgcgggccagggccaggctacggaagccgcggcgagggcgtccgcgagccggtgctccagctgccggaagcgcgtggggctgacggggttccggtgccgctgcggcgagctcttctgcggcgcgcaccggtactcggaccggcacggctgcagctacgactacaggggcgccgcccgggacgccatcgcccgggagaacccggtggtgcagtggttgagggcccgaaacgatgaacagatgggttggttggattgggttaggtgtatgtatatgtcacacgcaactttggacagaactattatactagtact

SEQ ID NO: 803 - protein, 189 aa, Zea mays
  misc_feature: Ceres Clone ID no. 1468822
  misc_feature (1)..(189): Bit score of 304.0 for hmm based on sequences of FIGURE 15.
  misc_feature (104)..(144): Pfam Name: zf-AN1 Pfam Description: AN1-like Zinc finger
  misc_feature (18)..(42): Pfam Name: zf-A20 Pfam Description: A20-like Zinc finger
  misc_feature: Functional Homolog Of SEQ ID NO. 749
MAQRDKKEEPTELRAPEITLCANNCGFPGNPATQNLCQSCFSASRSPSSPTSSSSSLASAASQPRPAALVVDAAAVEALAAPAAAAAGQGQATEAAARASASRCSSCRKRVGLTGFRCRCGELFCGAHRYSDRHGCSYDYRGAARDAIARENPVVQWLRARNDEQMGWLDWVRCMYMSHATLDRTIILV

SEQ ID NO: 804 - DNA, 519 bp, Sorghum bicolor
  misc_feature: Ceres Annot ID no. 8644540
  misc_feature: Encodes the peptide sequence at SEQ ID NO. 805
atggcacaagagagctggaaacaagagtctgaggaaactggagtccatgcccctgaggccccgattctgtgcataaacaattgtggtttcttcggcagcagcatgacaaacaatatgtgctcgaagtgctatagggacttcatcaagttgatggaaacccctgtggtggagaagaaggttatagcaggggcatcatcctctgcagtgctgccactagaggcagcaaagcgagacgcattgcccaccgctgctgctgctgctgctgctgaagcagccgcagctgtagacgacaagcaagcagcacaggaggagcccccaaagccgccgagcaaccggtgcctgacgtgccgcaagaaggtggggctgactgggttccagtgccgctgcggtggaaccttctgctccatgcaccgctacacggactcccaccagtgcaccttcgactacaagacagcggccagggagcagatcgccaagcagaaccctgtcgtgatggccgagaagatcaacaagatctga

SEQ ID NO: 805 - protein, 172 aa, Sorghum bicolor
  misc_feature: Ceres Annot ID no. 8644540
  misc_feature (1)..(172): Bit score of 333.4 for hmm based on sequences of FIGURE 7.
  misc_feature (113)..(153): Pfam Name: zf-AN1 Pfam Description: AN1-like Zinc finger
  misc_feature (21)..(45): Pfam Name: zf-A20 Pfam Description: A20-like zinc finger
  misc_feature: Functional Homolog Of SEQ ID NO. 742
MAQESWKQESEETGVHAPEAPILCINNCGFFGSSMTNNMCSKCYRDFIKLMETPVVEKKVIAGASSSAVLPLEAAKRDALPTAAAAAAAEAAAAVDDKQAAQEEPPKPPSNRCLTCRKKVGLTGFQCRCGGTFCSMHRYTDSHQCTFDYKTAAREQIAKQNPVVMAEKINKI

SEQ ID NO: 806 - DNA, 504 bp, Populus balsamifera subsp. trichocarpa
  misc_feature: Ceres ANNOT ID no.1450673
  misc_feature: Encodes the peptide sequence at SEQ ID NO 807
atggcagaagaacaacacagatgccaagaacaacgactctgcgtaaacaactgcggcttttatgggagccaagcaacagaaaatctttgttccaagtgttaccgtgatcttcatcaatcacagcccttgaatcatcagctgctaaacccatcatcatcatcggctgcttctgtttcctcctttgcatccccagccgttgatgttctaaaagtcaacaccaaccagaaagctcctgttgtggtggtgggagatgataaaaaagatgaggtaaaggcaggagagcctgcggctgggaagcagcagcagcataagccaaataggtgcttgacgtgtaggaggcgcgtggggttgacggggttcaagtgcaggtgtggtatggtgttttgtggaacacataggtacccggaacagcatgattgcgaatttgattttaagagtttagggaaacaacagattgctaaggctaatcccgttgttaagggagagaaactccaaaaaatttaa

SEQ ID NO: 807 - protein, 167 aa, Populus balsamifera subsp. trichocarpa
  misc_feature: Ceres ANNOT ID no.1450673
  misc_feature: Bit score of 303.5 for HMM based on sequences of FIGURE 7.
  misc_feature (108)..(148): Pfam Name: zf-AN1 Pfam Description: AN1-like Zinc finger
  misc_feature (11)..(35): Pfam Name: zf-A20 Pfam Description: A20-like zinc finger
  misc_feature: Functional Homolog Of Ceres SEEDLINE ID no. ME04477 at SEQ ID NO. 742
MAEEQHRCQEQRLCVNNCGFYGSQATENLCSKCYRDLHQSQPLNHQLLNPSSSSAASVSSFASPAVDVLKVNTNQKAPVVVVGDDKKDEVKAGEPAAGKQQQHKPNRCLTCRRRVGLTGFKCRCGMVFCGTHRYPEQHDCEFDFKSLGKQQIAKANPVVKGEKLQKI

SEQ ID NO: 808 - protein, 180 aa, Picea sitchensis
  misc_feature: Public GI ID no. 116778802
  misc_feature (1)..(180): Bit score of 274.6 for hmm based on sequences of FIGURE 7.
  misc_feature (121)..(161): Pfam Name: zf-AN1 Pfam Description: AN1-like Zinc finger
  misc_feature (21)..(45): Pfam Name: zf-A20 Pfam Description: A20-like zinc finger
  misc_feature: Functional Homolog Of SEQ ID NO. 742
MAQESWNREKEETGCQVPEGLIRCANNCGFFGSPATMSLCSKCYREFVLLNSPKSSFDKPQQQQIQGEVSIPRPDVGDEEIRSKYLAVDGSGPSCSTAAHQLEPQQQQNPPPPPPRQTNRCFSCRKRVGLTGFRCRCGDMFCALHRYSDKHNCTYDYKTAGREAIAKANPLVKADKILRF

SEQ ID NO: 809 - protein, 170 aa, Picea sitchensis
  misc_feature: Public GI ID no. 116778893
  misc_feature (1)..(170): Bit score of 291.2 for hmm based on sequences of FIGURE 7.
  misc_feature (111)..(151): Pfam Name: zf-AN1 Pfam Description: AN1-like Zinc finger
  misc_feature (21)..(45): Pfam Name: zf-A20 Pfam Description: A20-like zinc finger
  misc_feature: Functional Homolog Of SEQ ID NO. 742
MAQESWKNMGEDRGRQPPGGPVLCSNKCGFFGSSATMNMCSKCYRDHFLAQTQASAVKSAVEKSLSLDIDSSKALRFDATGVRNPAEIVGSSSDDGNSVSSEEPPRVSNRCQSCRKRVGLTGFKCRCGYVFCSLHRYSDKHGCSFDYKEAGRQEIEKANPVVKAEKIQKI

SEQ ID NO: 810 - protein, 181 aa, Picea sitchensis
  misc_feature: Public GI ID no. 116778998
  misc_feature (1)..(181): Bit score of 316.1 for hmm based on sequences of FIGURE 7.
  misc_feature (122)..(162): Pfam Name: zf-AN1 Pfam Description: AN1-like Zinc finger
  misc_feature (21)..(45): Pfam Name: zf-A20 Pfam Description: A20-like zinc finger
  misc_feature: Functional Homolog Of SEQ ID NO. 742
MDQENWNIGADGTGCQAPEGHTLCANNCGFFGSSATRNLCSKCYRDLIMKEAQATSAMAAVEKSFAAGSPMDEVPLSSPDAIVQQNRVQISAAVAGVSSVQLADSGSSSSSPQPPAETPNRCFSCRKRVGLTGFKCRCENTFCGLHRYAEKHSCSFDFKAAGREAIAKANPVVKAAKIDKL

SEQ ID NO: 811 - protein, 168 aa, Brassica rapa
  misc_feature: Public GI ID no. 157849766
  misc_feature (1)..(168): Bit score of 367.1 for hmm based on sequences of FIGURE 7.
  misc_feature (109)..(149): Pfam Name: zf-AN1 Pfam Description: AN1-like Zinc finger
  misc_feature (15)..(39): Pfam Name: zf-A20 Pfam Description: A20-like zinc finger
  misc_feature: Functional Homolog Of SEQ ID NO. 742
MDHDKTGCQSPPEGPKLCINNCGFFGSAATMNMCSKCHKTILFQQEQGAKLASAVSGSPSNILKETFTAALVDAETKSIEPVAVSVQAVAEVVAPEEAAAKPKEGPSRCTTCNKRVGLTGFKCRCGDLFCGTHRYADVHNCSFDYHVAAQEAIAKANPVVKADKLDKI

SEQ ID NO: 812 - protein, 160 aa, Chlamydomonas reinhardtii
  misc_feature: Public GI ID no. 159474166
  misc_feature (1)..(160): Bit score of 152.4 for hmm based on sequences of FIGURE 7.
  misc_feature (101)..(141): Pfam Name: zf-AN1 Pfam Description: AN1-like Zinc finger
  misc_feature (9)..(33): Pfam Name: zf-A20 Pfam Description: A20-like zinc finger
  misc_feature: Functional Homolog Of SEQ ID NO. 742
MEREQASSPQLCEKGCGFFANVGCGGMCSKCHREEARQHANAQATSSQPKPVEVAASRPVHESFPQPAAPSEAVASPVAEASTSSGDASPSATKSANPSRCLCCKKKVGLTGFKCKCGDVFCGTHRYAESHNCPFDYKTVHKEKLASNNPVVQASKVQKI

SEQ ID NO: 813 - protein, 188 aa, Physcomitrella patens subsp. patens
  misc_feature: Public GI ID no. 168036656
  misc_feature (1)..(188): Bit score of 250.6 for hmm based on sequences of FIGURE 7.
  misc_feature (129)..(169): Pfam Name: zf-AN1 Pfam Description: AN1-like Zinc finger
  misc_feature (18)..(42): Pfam Name: zf-A20 Pfam Description: A20-like zinc finger
  misc_feature: Functional Homolog Of SEQ ID NO. 742
MATERVSQETTSQAPEGPVMCKNLCGFFGSQATMGLCSKCYRETVMQAKMTALAEQATQAAQATSATAAAVQPPAPVHETKLTCEVERTMIVPHQSSSYQQDLVTPAAAAPQAVKSSIAAPSRPEPNRCGSCRKRVGLTGFKCRCGNLYCALHRYSDKHTCTYDYKAAGQEAIAKANPLVVAEKVVKF

SEQ ID NO: 814 - DNA, 471 bp, Populus balsamifera subsp. trichocarpa
  misc_feature: Ceres ANNOT ID no.1456578
  misc_feature: Encodes the peptide sequence at SEQ ID NO 815
atggagcaagaatcccaaaagagaaagctagaagacagcagcagtaacgaggcacaaaacacgccaattctttgtgtgaataactgtggtttttttggaagccccaacactaataatctctgctctaaatgttacaaagaattccttctaacccaacaagacacaactacaacaacaattgatgttccagttcatgttgccgaaaacagtgcagcagcagcagcagaagttgaagggcaacaagaaggaggtgaagaggagaagcggccggtggtggtggcaaacaggtgcaacttctgcaggaaaaaagtgggcttgacagggttcaagtgccgttgtggatacactttctgttcgcagcacagatattcggacaagcataactgtgtgttcgattacaagagtgctggacaggatgctattgctaaagccaatcctgttgtcaaggcagataagattgataagatatga

SEQ ID NO: 815 - protein, 156 aa, Populus balsamifera subsp. trichocarpa
  misc_feature: Ceres ANNOT ID no.1456578
  misc_feature: Bit score of 239.4 for HMM based on sequences of FIGURE 7.
  misc_feature (22)..(46): Pfam Name: zf-A20 Pfam Description: A20-like zinc finger
  misc_feature (97)..(137): Pfam Name: zf-AN1 Pfam Description: AN1-like Zinc finger
  misc_feature: Functional Homolog Of Ceres SEEDLINE ID no. ME04477 at SEQ ID NO. 742
MEQESQKRKLEDSSSNEAQNTPILCVNNCGFFGSPNTNNLCSKCYKEFLLTQQDTTTTTIDVPVHVAENSAAAAAEVEGQQEGGEEEKRPVVVANRCNFCRKKVGLTGFKCRCGYTFCSQHRYSDKHNCVFDYKSAGQDAIAKANPVVKADKIDKI

SEQ ID NO: 816 - protein, 172 aa, Physcomitrella patens subsp. patens
  misc_feature: Public GI ID no. 168053490
  misc_feature (1)..(172): Bit score of 251.7 for hmm based on sequences of FIGURE 7.
  misc_feature (113)..(153): Pfam Name: zf-AN1 Pfam Description: AN1-like Zinc finger
  misc_feature (21)..(45): Pfam Name: zf-A20 Pfam Description: A20-like zinc finger
  misc_feature: Functional Homolog Of SEQ ID NO. 742
MAQYGRKPDTEETNCQVPEGPVRCTNNCGFFGSAVTMGMCSKCYRDFVLSQSRTSSAKIAGASPPVYETQEPVADRAQIQNSCLSSTQPEAAGASSGASASGQDPSRSRPNRCFSCKKRLGLTGFECRCGNLFCSAHRYSDKHSCTFDYKLAGRDSISKANPVVKADKINKI

SEQ ID NO: 817 - protein, 165 aa, Lotus japonicus
  misc_feature: Public GI ID no. 193237563
  misc_feature (1)..(165): Bit score of 325.1 for hmm based on sequences of FIGURE 7.
  misc_feature (106)..(146): Pfam Name: zf-AN1 Pfam Description: AN1-like Zinc finger
  misc_feature (13)..(37): Pfam Name: zf-A20 Pfam Description: A20-like zinc finger
  misc_feature: Functional Homolog Of SEQ ID NO. 742
MAEEHRCEAPEGHRLCVNNCGFSGSPATMDLCSKCYRDIRLKEQQEASTKSTIETALSSSSSVAKPPSSTSSPSPAVDLAPPAKAETASISLTAGPILQAAQPNRCATCRKRVGLTGFKCRCEVTFCGAHRYPEKHACSFDFKTVGREAIARENPVVRAEKLRRI

SEQ ID NO: 818 - DNA, 902 bp, Zea mays
  misc_feature: Ceres Clone ID no. 100879386
  misc_feature: Encodes the peptide sequence at SEQ ID NO. 819
tatattcagtgatggaacacaaggaggccggctgccagcagccggagggcccaatcctatgcatcaataactgtggtttctttggaagcgctgccaccatgaacatgtgctccaagtgccacaaggagatgataatgaagcaggagcaggcccagttggctgcctcctccatcgatagcattgtcaatggcggtgataatgggaaaggacctgcaattgctgcaactgtaggtgtggcagttcctcaagtcgaggagaagactatcgccgtgcagcctatgcatgtcgctgaaaccagcgaggctgctgctgttatcgcgaaggccaaggaaggcccaaaccggtgcgcaacctgtaggaagcgtgttgggttgacgggttttaactgccgatgcgggaacacgtactgttcgatgcaccgctactccgacaaacacgactgccagttcgactatcgaactgcagctagggacgctatcgccaaggccaatccagtggtgaaggcggagaagcttgacaagatctgaggcgggggcattgggtaacgaaaaatggttgcgatctgcaagaattcagcatgtctctttgctgctttatcattgaacttcccattcttgtcttgctgtcacgtcccctggggttcaatactatgatgcgcacagcatcctggcagctgcaagaattcatccccagtcgagtcacgaaaatggtttgcgtgttgactatgtcgtgtaagcttattcagttattcttggtggtttgggtcggtatcgtgtcattccccgtttaggtagctctgtaatctactattctcaatttctcatgtgtgttgccttccaatcagtaatagtaatcagcaattgtctgccatatctcctacaagtatattttccagttctatt

SEQ ID NO: 819 - protein, 171 aa, Zea mays
  misc_feature: Ceres Clone ID no. 100879386
  misc_feature (1)..(171): Bit score of 364.0 for hmm based on sequences of FIGURE 7.
  misc_feature (112)..(152): Pfam Name: zf-AN1 Pfam Description: AN1-like Zinc finger
  misc_feature (14)..(38): Pfam Name: zf-A20 Pfam Description: A20-like zinc finger
  misc_feature: Functional Homolog Of SEQ ID NO. 742
MEHKEAGCQQPEGPILCINNCGFFGSAATMNMCSKCHKEMIMKQEQAQLAASSIDSIVNGGDNGKGPAIAATVGVAVPQVEEKTIAVQPMHVAETSEAAAVIAKAKEGPNRCATCRKRVGLTGFNCRCGNTYCSMHRYSDKHDCQFDYRTAARDAIAKANPVVKAEKLDKI

SEQ ID NO: 820 - DNA, 802 bp, Glycine max
  misc_feature: Ceres Clone ID no. 532446
  misc_feature: Encodes the peptide sequence at SEQ ID NO. 821
atagttttccttctttctttctttgtgaaaaaacaaaaagtccaaaccatggctcagaaaaccgagaaagaagaaaccgacttcaaggttcccgaaacgattacgctttgcgttaacaactgcggcgtcaccggaaaccctgctacgaataacatgtgtcagaagtgcttcaccgccttcaccacctctaccgccaccacgtccggcgccggaggtgccggaatagcttctccggctaccagatccggcatctccgcgcgtccactgaagagatcttttcccgaggagccctcgccgccggcggatcctccgtcttcagaccagacgaccccgtcggaggcgaagcgcgtggtgaaccgctgctccggctgcaggaggaaggtcggactcaccggatttcggtgccgatgcggcgagctcttctgcgccgagcaccggtactccgaccgccacgactgcagctacgactacaaagccgccggaagagaagccatcgcgagggagaatccggtgattagagccgcgaagatcgtcaaagtctgaaaaaaaacaaaaaagaaggaaaaaacccgaacggaacggaatctcaaaacgacgtcgttgacggttgacctttcgcgcgatcgggttcaggtcacgggtttcgctttttttcttttcagatttatatatagagagaagaaaaaaaaagtagcagataacaggtttgagagagagagagagagagtgtgaggttttagattgagagagagagcgagagagagagattgttgctgaaaagaagatgaagaagaatttatcc

SEQ ID NO: 821 - protein, 164 aa, Glycine max
  misc_feature: Ceres Clone ID no. 532446
  misc_feature (1)..(164): Bit score of 313.3 for hmm based on sequences of FIGURE 15.
  misc_feature (105)..(145): Pfam Name: zf-AN1 Pfam Description: AN1-like Zinc finger
  misc_feature (18)..(42): Pfam Name: zf-A20 Pfam Description: A20-like zinc finger
  misc_feature: Functional Homolog Of SEQ ID NO. 749
MAQKTEKEETDFKVPETITLCVNNCGVTGNPATNNMCQKCFTAFTTSTATTSGAGGAGIASPATRSGISARPLKRSFPEEPSPPADPPSSDQTTPSEAKRVVNRCSGCRRKVGLTGFRCRCGELFCAEHRYSDRHDCSYDYKAAGREAIARENPVIRAAKIVKV

SEQ ID NO: 822 - DNA, 668 bp, Miscanthus x giganteus
  misc_feature: Ceres Clone ID no. 2055733
  misc_feature: Encodes the peptide sequence at SEQ ID NO. 823
tttttttcgaagcccaccgaattccctgcgattcctctcccctcgcctcctcgtcttcctctaggggatcgccggagaggaatcgcagagggccgtctcatccgagttaaggaagccatggagcacaaggagactggatgccaggcccccgagggacccatcctttgcatcaataactgcggcttcttcggaagcgcagctaccatgaacatgtgctccaagtgccacaaggagatgataatgaagcaggagcaggccaagctggctgcctcctctatcgacagcatcgtcaatggcaacgatgctgtcatggaaccagttgttgctggcaacacagtggtagctgttgctccagttgagttgcaaacaatgaacgtgcagcccactgatgttgctggacctagcgagggggcggcggtgatctccaaagggaaggtagggccaaaccggtgcagcacttgcaggaagagggttggacttacaggattcaactgccggtgtgggaacttgtactgtgcactccaccgctactccgacaagcatgactgcaagtttgactatcggactgctgctagggatgccattgccaaggctaatccagtggtgaaggcggacaagctcgacaagatctagggtttcctacggttggctcaggaagattgcaacct

SEQ ID NO: 823 - protein, 171 aa, Miscanthus x giganteus
  misc_feature: Ceres Clone ID no. 2055733
  misc_feature (1)..(171): Bit score of 356.5 for hmm based on sequences of FIGURE 7.
  misc_feature (112)..(152): Pfam Name: zf-AN1 Pfam Description: AN1-like Zinc finger
  misc_feature (14)..(38): Pfam Name: zf-A20 Pfam Description: A20-like zinc finger
  misc_feature: Functional Homolog Of SEQ ID NO. 742
MEHKETGCQAPEGPILCINNCGFFGSAATMNMCSKCHKEMIMKQEQAKLAASSIDSIVNGNDAVMEPVVAGNTVVAVAPVELQTMNVQPTDVAGPSEGAAVISKGKVGPNRCSTCRKRVGLTGFNCRCGNLYCALHRYSDKHDCKFDYRTAARDAIAKANPVVKADKLDKI

SEQ ID NO: 824 - DNA, 723 bp, Miscanthus x giganteus
  misc_feature: Ceres Clone ID no. 2056478
  misc_feature: Encodes the peptide sequence at SEQ ID NO. 825
catttcgaagcccaccgaactccctgcgattcctctcccctcgcctcctcgtcttcccctaggggatcgccggagaggaatcgcaaagagggccgtctcgtccgagttaaggaagccatggagcacaaggagactggatgccaggctcccatcctttgcatcaataactgcggcttcttcggcagtgcagctaccatgaacatgtgctccaagtgccacaaggagatgataacgaagcaggaccatgccaagctggctgcctcctctatcgacagcatcgtcaatggcaacgatgctgtcatggaaccagttgtttctggcaacacagtggtagctgttgctcaagttgagttgcaaacgatgaacgtgcagcccactgatgttgctggacctagcgagggggcggcggtgatctccaaagggaaggtagggccgaaccggtgcagcacttgcaggaagagggttagacttacagggttcaactgccggtgtgggaacttgtactgtgcactccaccgctactccgacaagcatgactgcaagtttgactatcggactgctgctagggatgccattgccaaggctaatccagtggtgaaggcggacaagctcgacaagatctagggtttcctacggttggctcaaggaagattgcaacctgtggtacttcttcatcatgcgggattgctgctttgcccatgcctttccctttcatgtttgctg

SEQ ID NO: 825 - protein, 168 aa, Miscanthus x giganteus
  misc_feature: Ceres Clone ID no. 2056478
  misc_feature (1)..(168): Bit score of 324.7 for hmm based on sequences of FIGURE 7.
  misc_feature (109)..(149): Pfam Name: zf-AN1 Pfam Description: AN1-like Zinc finger
  misc_feature (11)..(35): Pfam Name: zf-A20 Pfam Description: A20-like zinc finger
  misc_feature: Functional Homolog Of SEQ ID NO. 742
MEHKETGCQAPILCINNCGFFGSAATMNMCSKCHKEMITKQDHAKLAASSIDSIVNGNDAVMEPVVSGNTVVAVAQVELQTMNVQPTDVAGPSEGAAVISKGKVGPNRCSTCRKRVRLTGFNCRCGNLYCALHRYSDKHDCKFDYRTAARDAIAKANPVVKADKLDKI

SEQ ID NO: 826 - DNA, 1513 bp, Triticum aestivum
  misc_feature: Ceres Clone ID no. 913923
  misc_feature: Encodes the peptide sequence at SEQ ID NO. 827
agcaaaccaacttcctctccttcctccgctcccaccgaaccatcctcatcacagcctctccttctcttcgttcgctgctcccgtcgtagcccacgcatcttgttgcttttctccaggcgcttcttcagtcttcctccctgtgtcggtccgcgatctcgtcatgatgaaccacgccacctttgctgccgaggacgcggtcaccgccgtgacggcgccggcgcagccgggtcgccattttgtgtcgctcccgccgcggagggcgcgcgactgcaggaaggcctccctgggccgcatggacctcgccacctcggcggtgctgatggccgggtctctgctggactcgatgaaggcctcctcgccccgccacgccatgtcccccgccggcgccgaccacgaggagtggatcgagaagcacccctcagcattggagtggttcgagggcgtgctcgcggcggccgaggggaagcagatcgtcatgttcctcgactacgacggcaccctttcaccgatcgtcgaggaccccgaccgcgccgtcatgaccgaggagatgagggacgcggtgaggggcgtcgcccagcatttcccgaccgccatcgtgagtgggagatgcagagacaaggtgttcaactttgtgaaactggaggagctgtactatgccgggagccacggcatggacatcaagggccccaccaaagtgtctaaccacaaggcaaaggctgacgaggttctgtgccagccggcgaccgagttcttgcctgtcattcaggaggtgtatgagacgctgaccgcgaagatggagtccatcccgggggccatggtggagaacaacaagttctgcctctcggtgcacttccgctgcgtcgaggaggcggaatgggacgctctgggcagggaggtgaaggcggtgctggacgactacccgaaactctgcctcaccaaggggagaaaggtcctcgagatccggcccttcatcaagtggaacaaaggaaacgcccttaagttcttgctcaagtctctcggttatgcagggcgtggcgacgttttcccgatatatattggagatgaccgcacagacgaggatgcgttcaaggtgctgcgcaacatgggacaaggcatcgggatccttgtgaccaagtttcccaaggacactagcgcatcgtactctctgcgtgagcctgctgaggtaaaggagttcatgcgcaagctagtgaagagcaacggggtaaagaagggttaattcatcaatcaacaaccttctagctctaactcaacatgaagatcgagcaggctatatagcttgtacatcaagtctagcttgtttcctttttggacttggtgttgtctctcctttcatctagtagaacaatgcatgcatgcgtgttagggtcgatgtagaagatccagatcgatcaatgacccatgctaggccttggctctgaaggtttctattactgtatccttctctcaaggtcttgtaattagccttcccttagctatgacagaaatggtattg

SEQ ID NO: 827 - protein, 358 aa, Triticum aestivum
  misc_feature: Ceres Clone ID no. 913923
  misc_feature (1)..(358): Bit score of 558.4 for hmm based on sequences of FIGURE 9.
  misc_feature (107)..(340): Pfam Name: Trehalose_PPase Pfam Description: Trehalose-phosphatase
  misc_feature: Functional Homolog Of SEQ ID NO. 1129
MMNHATFAAEDAVTAVTAPAQPGRHFVSLPPRRARDCRKASLGRMDLATSAVLMAGSLLDSMKASSPRHAMSPAGADHEEWIEKHPSALEWFEGVLAAAEGKQIVMFLDYDGTLSPIVEDPDRAVMTEEMRDAVRGVAQHFPTAIVSGRCRDKVFNFVKLEELYYAGSHGMDIKGPTKVSNHKAKADEVLCQPATEFLPVIQEVYETLTAKMESIPGAMVENNKFCLSVHFRCVEEAEWDALGREVKAVLDDYPKLCLTKGRKVLEIRPFIKWNKGNALKFLLKSLGYAGRGDVFPIYIGDDRTDEDAFKVLRNMGQGIGILVTKFPKDTSASYSLREPAEVKEFMRKLVKSNGVKKG

SEQ ID NO: 828 - DNA, 1092 bp, Sorghum bicolor
  misc_feature: Ceres Annot ID no. 8656803
  misc_feature: Encodes the peptide sequence at SEQ ID NO. 829
atgacgaagcacgccgcctaccccagcgaggacgtggtcgccgttgtggcggcgccagtgccggtgagccggcatttcacatcgttcccgccgctaaaggatgcccctctcgactgcaagaagcatgttgtcgtggacctctccgcttctagggatgccatcatgggcggctcctggttcgagtccatgaaggcttcatcgccgcggcacgccgatgacgccgagcaccacggcgattggatggagaagcacccatcagcattggcgcagtttgaggcgctgctggccgccgccaaggggaagcagatcgtgttgttcctagactacgatggcaccctgtcaccaatcgtcgaggaccccgaccgcgccgtcatgtcagaagagatgagagaagccgtgcggcgtgtcgcggagcacttccccaccgcaattgtgagcggaagatgcagggacaaggtgttcaacttcgtgaagctgacggagctgtactacgccggaagccatggcatggacatccagggtcccgccaatcaccacctccaggcaaatgctgaagttgtccattaccaagctggaactgagtttctgcccgtcatcgaagaggtgtttggcacgctgacggcgaagatggaggcgatcgccggcgccaaggtggagaacaacaagtactgcctgtccgtccacttccgctgcgtcagggaggaggaatggaatgccgtgaacgaggaggtcaggtcggtgctcaaggactaccccaacctcaagctcactcacggcagaaaggtcctggagattcgcccgtccataaagtgggacaagggcaaggcccttgagttcttgctcaagtctcttggctatgctgggcgcaacgacgtcttcccgatttacatcggagatgatcgcactgacgaggacgctttcaagatgcttcgcaacatgggacagggcatcggaatcctggtgtcgaggctccctaaggagacggtggcatcctactcgctgagtgaccctaccgaggtcaaggagttcctctgcaagctggagaagtcggccaaggaggacgcgccagacctagctagtagtggattgtag

SEQ ID NO: 829 - protein, 363 aa, Sorghum bicolor
  misc_feature: Ceres Annot ID no. 8656803
  misc_feature (1)..(363): Bit score of 567.4 for hmm based on sequences of FIGURE 9.
  misc_feature (106)..(338): Pfam Name: Trehalose_PPase Pfam Description: Trehalose-phosphatase
  misc_feature: Functional Homolog Of SEQ ID NO. 1129
MTKHAAYPSEDVVAVVAAPVPVSRHFTSFPPLKDAPLDCKKHVVVDLSASRDAIMGGSWFESMKASSPRHADDAEHHGDWMEKHPSALAQFEALLAAAKGKQIVLFLDYDGTLSPIVEDPDRAVMSEEMREAVRRVAEHFPTAIVSGRCRDKVFNFVKLTELYYAGSHGMDIQGPANHHLQANAEVVHYQAGTEFLPVIEEVFGTLTAKMEAIAGAKVENNKYCLSVHFRCVREEEWNAVNEEVRSVLKDYPNLKLTHGRKVLEIRPSIKWDKGKALEFLLKSLGYAGRNDVFPIYIGDDRTDEDAFKMLRNMGQGIGILVSRLPKETVASYSLSDPTEVKEFLCKLEKSAKEDAPDLASSGL

SEQ ID NO: 830 - DNA, 1119 bp, Populus balsamifera subsp. trichocarpa
  misc_feature: Ceres ANNOT ID no.1496359
  misc_feature: Encodes the peptide sequence at SEQ ID NO 781
atgacaaaccagaatgtggttgtgcctgatgccaaacagggtattgatatcaccatcgcaatggtgctgcccaagtctctgttttcacctgttgtgccaaagccattgcctgccgctcctggtgggtatttcacaataacccgaaagaggttctcgaagaagacagaaactggaggcaaaatcagttcctgggttgattctatgagggattcttcacctacccgtgtcaaatccaccacttctttatcagaaactgaagagaaaaattcttggattgtaaaccatccttctgctctgaacatgtttgagcaaatagtgaaaggctcaaagggaaagcagattgtgatgttccttgattatgatggtacactgtcacccattgttgaagatcctgacagagcattcatgaccaatgagatgagagaagctgtcagggacgttgctagatactttcccacggctatagtgacgggaaggtgtagaaaaaaggtgtatagctttgtaagattggcagggctttattatgctggtagccatggcatggacatcaagggaccatccaaaaataattgcaaatacgaaaaaggtggtgtactctttcaacctgccagtgaatttttacccatgattgatgaggtgtacaatgtcttgttggagagaacaaaatctatcccaggagctaaagtagaaaacaacaaattttgcgtatccgtacactttcgatgtgttgaggaaaagatgtgggctatattagtagagcaagtccgatcagttctcaatgattatcccaagcttagattaactcaagggaggaaggttttagagatccgacccaccattaaatgggacaagggcaaagctcttgaattcttgttagagtcattaggatatgccaattctactgacgtttttccggtctatattggagatgatcgaactgatgaggacgcattcaaggttctaagaaacagggggcaagggcttgggattcttgtttctaaagttcccaaggaaacaaatgcctcttattctctacaggaaccaaaagaggttaaagacttcttacggcgattggtggagtggaagcgatcttcgttacaaggacaacgtagagcgtaa

SEQ ID NO: 831 - DNA, 1155 bp, Arabidopsis thaliana
  misc_feature: Ceres CLONE ID no.13007
  misc_feature: Encodes the peptide sequence at SEQ ID NO 832
atcgatcactgaatcttcttcttcttcttcttcttcttcttcttcttcttcttcttccttctctcaagaacaggtaaaactctctcctcttctccttctttttctctcctctctcttctctcttttaacaaaaaaaaaactgtcttttcttcatttctgttcttttttttggttgccgagaaaaacagaggataattttccgatctctgttttttttttctcggtgaccagaatcggttggttctgttttttttttttttttttccttctttgttattgttatcttattaatgaatcttttttgttgttataatttacagattttttttaaacgagcttgatcaataaattctctcaagatctatggcagaagagcatcgatgtcagacaccagaaagcaaccgtctctgtgttaacaactgtggcttcctcggcagctccgccaccatgaatctctgttctaattgttacggcgatctttgtctcaaacaacaacaacaatcctcctccatcaaatccaccgttgaatcttccctctctgtatctcctccgtcgtcatcatcatcggagatctcttctccgatcatccctcctctccttaaaaatccatcagtcaagctagaggtaccggagaaaaaggcggtgatttcgctgccgacgacggagcagaatcagcaacagaggccgaatcggtgcacgacgtgtaggaaacgggtcgggttaaccggattcaagtgccggtgcggtacgatgttttgcggggttcataggtacccggagatccatggatgcagctacgatttcaaatcggccggacgtgaagagatcgcgaaagcgaatccgttggtgaaagcagcgaagcttcagaagatatgatcagagccgttcgatgcgttgacttttcctctcgtaagtcttcatttctacgcgtatgtgtgtcctccgtcccccgagaaatacggatggtgtcgatttgattgatctcagccgttggatcaaaaatggtttattattgtaaaagattgattatgtatttatcaaagggacacgtgtcacgtggttttaggatggagacgctttcgctttctctccttcattttattttctttttcctttcagaaagaaataagattattcgcgttggctttttctttt

SEQ ID NO: 832 - protein, 170 aa, Arabidopsis thaliana
  misc_feature: Ceres CLONE ID no.13007
  misc_feature: Bit score of 342.8 for HMM based on sequences of FIGURE 7.
  misc_feature (111)..(151): Pfam Name: zf-AN1 Pfam Description: AN1-like Zinc finger
  misc_feature (13)..(37): Pfam Name: zf-A20 Pfam Description: A20-like zinc finger
  misc_feature: Functional Homolog Of Ceres SEEDLINE ID no. ME04477 at SEQ ID NO. 742
MAEEHRCQTPESNRLCVNNCGFLGSSATMNLCSNCYGDLCLKQQQQSSSIKSTVESSLSVSPPSSSSSEISSPIIPPLLKNPSVKLEVPEKKAVISLPTTEQNQQQRPNRCTTCRKRVGLTGFKCRCGTMFCGVHRYPEIHGCSYDFKSAGREEIAKANPLVKAAKLQKI

SEQ ID NO: 833 - DNA, 896 bp, Arabidopsis thaliana
  misc_feature: Ceres CLONE ID no.5522
  misc_feature: Encodes the peptide sequence at SEQ ID NO 834
atcgatcactgaatcttcttcttcttmttcttmttcttcttccttctctcaagaacagattttttttaaacgagcttgatcaataaattctctcaagatctatggcggaagagcatcgatgtcagacaccagaaagcaaccgtctctgtgttaacaactgtggcttcctcggcagctccgccaccatgaatctctgttctaattgttacggcgatctttgtstcaaacaacaacaacaatcctcctccatcaaatccaccgttgaatcttccctctctttatctcctccgtcgtcatcatcatcggagatctcttctccgatcatccctcctctccttaaaaatccatcagtcaagctagaggtaccggagaaaaaggcggtgatttcgctgccgacgacggagcagaatcagcaacagaggccgaatcggtgcacgacgtgtaggaaacgggtcgggttaaccggattcaagtgccggtgcggtacgatgttttgcggggttcataggtacccggagatccatggatgcagctacgatttcaaatcggccggacgtgaagagatcgcgaaagcgaatccgttggtgaaagcagcgaagcttcagaagatatgatcagagccgttcgatgcgttgacttttcctctcgtaatcttcatttctacgcgtatgtgtgtcctccgtcccccgagaaatacggatggtgtcgatttgattgatctcagccgttggatcaaaaatggtttattattgtaaaagattgattatgtattaatcaaagggacacgtgtcacgtggttttaggatggagacgctttcgctttctctccttcattttattttctttttcctttcagaaagaaataagattattcgcgttggctttttctttttatc

SEQ ID NO: 834 - protein, 170 aa, Arabidopsis thaliana
  misc_feature: Ceres CLONE ID no.5522
  misc_feature: Bit score of 340.2 for HMM based on sequences of FIGURE 7.
  misc_feature (111)..(151): Pfam Name: zf-AN1 Pfam Description: AN1-like Zinc finger
  misc_feature (13)..(37): Pfam Name: zf-A20 Pfam Description: A20-like zinc finger
  misc_feature: Functional Homolog Of Ceres SEEDLINE ID no. ME04477 at SEQ ID NO. 742
  misc_feature (41)..(41): Xaa is any aa, unknown, or other
MAEEHRCQTPESNRLCVNNCGFLGSSATMNLCSNCYGDLCXKQQQQSSSIKSTVESSLSLSPPSSSSSEISSPIIPPLLKNPSVKLEVPEKKAVISLPTTEQNQQQRPNRCTTCRKRVGLTGFKCRCGTMFCGVHRYPEIHGCSYDFKSAGREEIAKANPLVKAAKLQKI

SEQ ID NO: 835 - DNA, 1032 bp, Arabidopsis thaliana
  misc_feature: Ceres CLONE ID no.30543
  misc_feature: Encodes the peptide sequence at SEQ ID NO 836
ctttttttctcttcccaaattctctcatcgatcactgaatcgttcttcttcttcttcttcttcttcttcttcttcttcttcttccttctctcaagaacagattttttttaaacgagcttgatcaataaattctctcaagatctatggcggaagagcatcgatgtcagacaccagaaagcaaccgtctctgtgttaacaactgtggcttcctcggcagctccgccaccatgaatctctgttctaattgttacggcgatctttgtctcaaacaacaacaacaatcctcctccatcaaatccaccgttgaatcttccctctctgtatctcctccgtcgtcatcatcatcggagatctcttctccgatcatccctcctctccttaaaaatccatcagtcaagctagaggtaccggagaaaaaggcggtgatttcgctgccgacgacggagcagaatcagcaacagaggccgaatcggtgcacgacgtgtaggaaacgggtcgggttaaccggattcaagtgccggttcggtacgatgttttgcggggttcataggtacccggagatccatggatgcagctacgatttcaaatcggccggacgtgaagagatcgcgaaagcgaatccgttggtgaaagcagcgaagcttcagaagatatgatcagagccgttcgatgcgttgacttttcctctcgtaagtcttcatttctacgcgtatgtgtgtcctccgtcccccgagaaatacggatggtgtcgatttgattgatctcagccgttggatcaaaaatggtttattattgtaaaagattgattatgtatttatcaaagggacacgtgtcacgtggttttaggatggagacgctttcgctttctctccttcattttattttctttttcctttcagaaagaaataagattattcgcgttggctttttctttttattaaattccggcttattattattattattattgtgtggcttttgcgtttacaaagtctattcagaaaaataaaaaaaatgatattaatttcccac

SEQ ID NO: 836 - protein, 170 aa, Arabidopsis thaliana
  misc_feature: Ceres CLONE ID no.30543
  misc_feature: Bit score of 332.4 for HMM based on sequences of FIGURE 7.
  misc_feature (111)..(151): Pfam Name: zf-AN1 Pfam Description: AN1-like Zinc finger
  misc_feature (13)..(37): Pfam Name: zf-A20 Pfam Description: A20-like zinc finger
  misc_feature: Functional Homolog Of Ceres SEEDLINE ID no. ME04477 at SEQ ID NO. 742
MAEEHRCQTPESNRLCVNNCGFLGSSATMNLCSNCYGDLCLKQQQQSSSIKSTVESSLSVSPPSSSSSEISSPIIPPLLKNPSVKLEVPEKKAVISLPTTEQNQQQRPNRCTTCRKRVGLTGFKCRFGTMFCGVHRYPEIHGCSYDFKSAGREEIAKANPLVKAAKLQKI

SEQ ID NO: 837 - DNA, 1068 bp, Sorghum bicolor
  misc_feature: Ceres Annot ID no. 8656795
  misc_feature: Encodes the peptide sequence at SEQ ID NO. 840
atgacgaagcacaccgccttcgccgcggacgacgcgatcaccgccgccgccgtcacgtcgcagcccggccgccggttcacgtcgtacccgccgccgacgagggcgcgcggcggatgcagggtggccgcggcggcggcggcggcgcgccaggccacggaccccggcgccgtggtcgtggccgtggggtccttgccggaactcgtgccgcgccacgccgacctcgacttcgagaactggatggagaagcacccgtcggcattggccgagttcgagtcggtgctggccgccgccaaggggaagcagatcgtgatgttccttgactacgacggcaccctgtcgccgatcgttaaggaccccgacagcgccgtcatgtccgaggagatgcgagacgcggtgagaggcgtggccgagcacttcccgacggcgatcgtgagcgggaggtgtagagacaaggtgttcaacttcgtgaagctggcggagctgtactacgccgggagccacggcatggacatcaaggggcccacggcacagtccaagcacaccaaggcaaaggccgaagctgttctgtgccaaccagcgagcgcgttcctgccggtcattgacgaggtgtaccgcacgctgacggcgaggacagcgccgatccccggagcgacggtggagaacaacaagttctgcctctccgtccatttccgctgcgtccacgaggagaaatggcgcgctctggaggagcaggtccggtcggtgctcaaggagtacccggacctccggctcaccaagggcaggaaggtcttggagatccggccgtccatcgagtgggacaagggcaacgccctacagttcttgcttgagtccctcggtttcgctgacagtaacaatgtgttcccgatatatatcggagacgatcgcacggatgaggacgcgttcaaggtgctgcgcagcatgggccaagggatcggaatccttgtgagcaagattccaaaggagaccagtgcatcctactccttgcgtgaaccttctgaggtgaaggagttcctgcgcaagttggtgaggtccaagcagcgggactag

SEQ ID NO: 838 - DNA, 834 bp, Arabidopsis thaliana
  misc_feature: Ceres CLONE ID no.14203
  misc_feature: Encodes the peptide sequence at SEQ ID NO 839
aataaaaatacagattctctcttcttagaaccatcaccgattcgaacagatctaataaatcgtttttttcaccagatttttttcgccggagtttgttttgatccattctgttatggcggaagaacacagacttcaagaaccacgattatgtgctaacaattgtggcttcttcggaagcacagctacacaaaatctctgttccaaatgttttcgagatcttcaacatcaagaacaaaactcttccaccgccaaacatgctcttacccaatccttagccgccgttggcgctgctgcgtcttcctccgtgtcgccaccgcctccgcctccagctgattcgaaagaaatcgttgaagcgaaatcagagaaacgagcggcggctgaaccggaggaggcggatggtccgccgcaagatccgaagcggtgtttgacttgtcggcggcgcgtgggaatcacggggtttcggtgtaggtgtggtttcgttttctgcgggacgcataggtacgcggagcaacatgaatgttcgtttgatttcaagcggatggggaaggataagatcgctaaagcgaatccgattgtgaaagctgataagcttgagaagatttgactttgttgtttgttgtttgttgttgttgctttggttttgtgcgtttgaatgaaacacacatgaagaagaaagagcaagaaacaaacatgtcaatgtaaatttaagctttatttgatgatttcttcagtttggttattaaatttgcttattattgatttgattgttccgtttgatgatcttgtagaaggcttaagtcgtattatcaatgtgtagaatttggatttggttgg

SEQ ID NO: 839 - protein, 163 aa, Arabidopsis thaliana
  misc_feature: Ceres CLONE ID no.14203
  misc_feature: Bit score of 293.0 for HMM based on sequences of FIGURE 7.
  misc_feature (10)..(34): Pfam Name: zf-A20 Pfam Description: A20-like zinc finger
  misc_feature (104)..(144): Pfam Name: zf-AN1 Pfam Description: AN1-like Zinc finger
  misc_feature: Functional Homolog Of Ceres SEEDLINE ID no. ME04477 at SEQ ID NO. 742
MAEEHRLQEPRLCANNCGFFGSTATQNLCSKCFRDLQHQEQNSSTAKHALTQSLAAVGAAASSSVSPPPPPPADSKEIVEAKSEKRAAAEPEEADGPPQDPKRCLTCRRRVGITGFRCRCGFVFCGTHRYAEQHECSFDFKRMGKDKIAKANPIVKADKLEKI

SEQ ID NO: 840 - protein, 355 aa, Sorghum bicolor
  misc_feature: Ceres Annot ID no. 8656795
  misc_feature (1)..(355): Bit score of 573.1 for hmm based on sequences of FIGURE 9.
  misc_feature (105)..(339): Pfam Name: Trehalose_PPase Pfam Description: Trehalose-phosphatase
  misc_feature: Functional Homolog Of SEQ ID NO. 1129
MTKHTAFAADDAITAAAVTSQPGRRFTSYPPPTRARGGCRVAAAAAAARQATDPGAVVVAVGSLPELVPRHADLDFENWMEKHPSALAEFESVLAAAKGKQIVMFLDYDGTLSPIVKDPDSAVMSEEMRDAVRGVAEHFPTAIVSGRCRDKVFNFVKLAELYYAGSHGMDIKGPTAQSKHTKAKAEAVLCQPASAFLPVIDEVYRTLTARTAPIPGATVENNKFCLSVHFRCVHEEKWRALEEQVRSVLKEYPDLRLTKGRKVLEIRPSIEWDKGNALQFLLESLGFADSNNVFPIYIGDDRTDEDAFKVLRSMGQGIGILVSKIPKETSASYSLREPSEVKEFLRKLVRSKQRD

SEQ ID NO: 841 - protein, 411 aa, Vitis vinifera
  misc_feature: Public GI ID no. 157351695
  misc_feature (1)..(411): Bit score of 957.8 for hmm based on sequences of FIGURE 9.
  misc_feature (123)..(367): Pfam Name: Trehalose_PPase Pfam Description: Trehalose-phosphatase
  misc_feature: Functional Homolog Of SEQ ID NO. 1129
MDLKSNHSSPVLTDPPPVNKSRFGIRSNLLPYSPPGAAFSSTLFLTIPRKKNGVLDDVRSSSWLDAMKSSSPTHKKITKDFNTVLASTDTDVTYRTWLLKYPSALKSFEQITNYAKGKRIALFLDYDGTLSPIVDNPDRAFMSDCMRATVRNVAKFFPTAIISGRSRDKVYNFVGLTELYYAGSHGMDIMGPVRHSISNDHPNCIRLTDKQGKEVNLFQPASEFLPMIDEVFRSLVRCTKEIKGAEVENNKFCVSVHYRNVDEKYWKTIAQCVDDILKDYPRLRLTHGRKVLEVRPVIDWDKGKAVEFLLESLGLNNSDDVLPIYVGDDRTDEDAFKFLRDGKRGYGILVSSVPKESNAFYSLRDPLEVMEFLKLLVMWKKSNITLSNLIFNLMNLSNLLNPNLTHTFFYI

SEQ ID NO: 842 - protein, 376 aa, Populus balsamifera subsp. trichocarpa
  misc_feature: Ceres ANNOT ID no.1447260
  misc_feature: Bit score of 798.2 for HMM based on sequences of FIGURE 9.
  misc_feature (112)..(348): Pfam Name: Trehalose_PPase Pfam Description: Trehalose-phosphatase
  misc_feature: Functional Homolog Of Ceres SEEDLINE ID no. ME20095 at SEQ ID NO. 1129
MDVESNHSSPVLADPASINSSRLGIYSNLLPYSPPGGSLSSSKYSRKKPGKLDEVCSSGWLDAMKSSSPPRKKLFKDGSDTAYSSWMFKHPSALNSFEEIANFAKNKKIAMFLDYDGTLSPIVDDPDNAFMSDDMRSIVKNVAKYFPTAIISGRSRDKVYQLVGLTELYYAGSHGMDILGPVGKASMSNDHPNYSESTTDQQGKEVNLFQPAREFIPMIDEVFRTLVENTKGIEGAKVENHKFCASVHFRNVDEEDILDKYPRLRRTHGRKVLEVRPMIDWNKGKAVEFLLESLGLSNRDDVLSIYIGDDLSDEDAFKVLREGNRGYGILVSSRPKETSAVYSLKDPIEVMKFLNSLVTWKKVEEGGCILNNRRTI

SEQ ID NO: 843 - protein, 383 aa, Vitis vinifera
  misc_feature: Public GI ID no. 157360731
  misc_feature (1)..(383): Bit score of 892.1 for hmm based on sequences of FIGURE 9.
  misc_feature (113)..(357): Pfam Name: Trehalose_PPase Pfam Description: Trehalose-phosphatase
  misc_feature: Functional Homolog Of SEQ ID NO. 1129
MDLKSNHASPVLTDPAPVNKSRLGIPSGFSSGKYVIIPRKKPGKLDDVRSNGWLDAMKSSSPPRKKLIKDFNVEVATDDTDNVTSSWMLKYPSALNSFEKIISYAKSKKIAMFLDYDGTLSPIVDDPDRALMSDAMRSTVKNLAKYFPTAIISGRSRDKVYELVGLKELYYAGSHGMDIMGPARYTACNDHSNCIKSSDDQGKKVNLFQPASEFLPMIDEVFRALVETTRGIEGAKVENHKFCASVHYRNVDENSWSTIAQYVHDVLKDYPRLRLTHGRKVLEVRPVIDWNKGKAVEFLLESLGLTNSEDVLPIYIGDDRTDEDAFKVLREGNRGYGILVSPVPKETKAFYSLKDPAEVMEFLNSLVRWKELDAPINSEGRGA

SEQ ID NO: 844 - protein, 373 aa, Populus balsamifera subsp. trichocarpa
  misc_feature: Public GI ID no. 118484760
  misc_feature (1)..(373): Bit score of 691.7 for hmm based on sequences of FIGURE 9.
  misc_feature (117)..(350): Pfam Name: Trehalose_PPase Pfam Description: Trehalose-phosphatase
  misc_feature: Functional Homolog Of SEQ ID NO. 1129
MTNQNVVVADTNSGINLAITVHVTNSSIFTTAAQKPPAAPGGYISISRKKLLKNLEISGGARFNAWVNSMRTSSPTHVKSTPSANDDQSSWILHHPSALEMFEQIIDASKGKQIVMFLDYDGTLSPIVDDPDRAFMSKKMRATVRKLARFFPTAIVSGRCRDKVYNFVRLAELYYAGSHGMDIKGPAKGSKYKKGSEGVVFQAGSEFLPMIDEVYKELVEKTKTTPGAKVENNKFCLSVHYRCVDEKKWSGLAQVVKSVLKEYPKLRLTQGRKVLEIRPTIKWDKGKALEFLLESLGFANCTDVFPVYIGDDRTDEDAFKVLRERGQGFGILVSKFPKDTSASYSLQEPTQVMDFLQRLVQWKRLAFQGQSRV

SEQ ID NO: 845 - protein, 378 aa, Vitis vinifera
  misc_feature: Public GI ID no. 157328467
  misc_feature (1)..(378): Bit score of 663.2 for hmm based on sequences of FIGURE 9.
  misc_feature (110)..(343): Pfam Name: Trehalose_PPase Pfam Description: Trehalose-phosphatase
  misc_feature: Functional Homolog Of SEQ ID NO. 1129
MTRQNVVVADSKSGINVAITMTVSNSSLFTKAVQKTRETQGGCINIPPKKVGGGARINAWVDSMRASSPTRVKSAASLSDQNSWMLRHPSALNMFEQIIEASKGKQIVMFLDYDGTLSPIVDDPDRAFMSDAMRAAVRQLARYFPTAIVSGRCRDKVYNFVRLAELYYAGSHGMDIKGPAKGSKYKKETKAVLFQPASEFLPMIDEVYKALLEKTKSIPGASVEHNKFCLSVHYRCVDEKKWSILAQQVRSVLQQYPKLRLTQGRKVLEIRPTIKWDKGKALEFLLESLGFGNCTDVFPVYIGDDRTDEDAFKILRDRGQGFGILVSKIPKDTSASYSLQEPLEARTLSYYIHALILFLYLLSHLLVLIIIFFFLINL

SEQ ID NO: 846 - protein, 158 aa, Brassica napus
  misc_feature: Ceres CLONE ID no.975913
  misc_feature: Bit score of 372.3 for HMM based on sequences of FIGURE 7.
  misc_feature (104)..(144): Pfam Name: zf-AN1 Pfam Description: AN1-like Zinc finger
  misc_feature (13)..(37): Pfam Name: zf-A20 Pfam Description: A20-like zinc finger
  misc_feature: Functional Homolog Of Ceres SEEDLINE ID no. ME04477 at SEQ ID NO. 742
MAEEHRCQTPEGHRLCANNCGFLGSSATMNLCSNCYGDLCLKQQQQGSSSLSAVSPPPPVITSISTPMIQPLVQNPSAELEVPAKNVSVTVTATEQPQKRPNRCTTCRKRVGLTGFKCRCGTTFCGAHRYPEVHGCTFDFKSAGREEIAKANPLVKAA

SEQ ID NO: 847 - DNA, 961 bp, Brassica napus
  misc_feature: Ceres CLONE ID no.967417
  misc_feature: Encodes the peptide sequence at SEQ ID NO 848
gtacaaatattcgatttttcagcagcgtcgtctctgtttccatcttctttctctttcttctcccttcccgatttcatcgttaattggtaaagaaaaaaagtcagtgaatcatctctcttcttcttcttcttctctcaagaacaggttttcggtttaaagcctcgaaattctctatggcggaagagcatcgatgtcagacgccggaaggccaccgtctctgtgctaacaactgcggcttcctcggcagctccgccaccatgaatctatgctccaactgctacggcgatctctgccttaagcaacagcaagcttccatgaaatccaccgtcgaatcctctctctccgccgtatctcctccgtcgtcagagatcggttctatgcaatccaccgttgaatcctctctctccgacgtatctcctccatcatcggagaccatttccatctcttctccaatgatccagcctctcgttcgaaacccatcagctgaactggaggtaacggcgaagaacgttccgaagacggtgactccgccgccggagcagcagcagaaacggccgaatcggtgcacgacgtgtaggaaacgggtcgggttgactgggttcaagtgccggtgcggaacgactttttgcggggctcacaggtacccggaggtccatggatgcmccttcgatttcaaatcggccggtcgcgaagagatcgccaaggcgaacccactcgtcaaagcggcgaagcttcagaagatttgatcgccgccgttcgatgcgttgacttttaaaccatcatttgaacgcgtttgtctcccccagaaatggtgttagattgatctcagccgttcatgatgtgtcattatgtaaaagatatgtactacgaaggacacgtgtcacgtgacgttttcctcatcttcccaattaattttcttttccccttaaagaaataagattattcgcgttggcttttctct

SEQ ID NO: 848 - protein, 190 aa, Brassica napus
  misc_feature: Ceres CLONE ID no.967417
  misc_feature: Bit score of 348.9 for HMM based on sequences of FIGURE 7.
  misc_feature (13)..(37): Pfam Name: zf-A20 Pfam Description: A20-like zinc finger
  misc_feature (131)..(171): Pfam Name: zf-AN1 Pfam Description: AN1-like Zinc finger
  misc_feature: Functional Homolog Of Ceres SEEDLINE ID no. ME04477 at SEQ ID NO. 742
  misc_feature (164)..(164): Xaa is any aa, unknown, or other
MAEEHRCQTPEGHRLCANNCGFLGSSATMNLCSNCYGDLCLKQQQASMKSTVESSLSAVSPPSSEIGSMQSTVESSLSDVSPPSSETISISSPMIQPLVRNPSAELEVTAKNVPKTVTPPPEQQQKRPNRCTTCRKRVGLTGFKCRCGTTFCGAHRYPEVHGCXFDFKSAGREEIAKANPLVKAAKLQKI

SEQ ID NO: 849 - protein, 403 aa, Physcomitrella patens subsp. patens
  misc_feature: Public GI ID no. 168011492
  misc_feature (1)..(403): Bit score of 596.6 for hmm based on sequences of FIGURE 9.
  misc_feature (128)..(371): Pfam Name: Trehalose_PPase Pfam Description: Trehalose-phosphatase
  misc_feature: Functional Homolog Of SEQ ID NO. 1129
MALRSKRSALCAEPPTSSCGPSLSVASVIPTSPSKSSVLSASSGCSMPIPIVLPKKHNSFPGRGSVHTWIDGMRAQSPPPIRSLPGDTPELFDLEAAIYKSWLEDHPSALSSFDRVIKQSHNKQIVVFLDYDGTLSPIVEDPERAFMSAEMRATVKEVASCFPTAVISGRSRPKVYDFVRLSELYYAGSHGMDIQGPSNISDGFRVKGTKSRDKKGNDATNFQPASEFLPLINKVTTALIENTKMVKGAKVENNKFCVSVHFRRVKEELWEGLAERVGNVMKEFPTLSLTHGRKVLEVRPSIEWDKGKAVEFLLKSLGFQDTNDLIPLYLGDDKTDEDAFKVVNSTKYGCSILVSSVAKPTEAKFSLRDPSEVMGFLCKLVHWEKCRQDPNSIYMDRNFSQIP

SEQ ID NO: 850 - protein, 384 aa, Zea mays
  misc_feature: Public GI ID no. 194700086
  misc_feature (1)..(384): Bit score of 559.1 for hmm based on sequences of FIGURE 9.
  misc_feature (125)..(355): Pfam Name: Trehalose_PPase Pfam Description: Trehalose-phosphatase
  misc_feature: Functional Homolog Of SEQ ID NO. 1129
MTNQDVVVPDMGIAAAAALPPPGLFACRGVAGAVSSLRGTYGSLGLPGGAAADGGEFRSPVAAAANAPPGRTSCTSRVVEAIRASSPARCPAVDEYDAWTRKHPSALGSFDQIAAAAKGKRVVMFMDYDGTLSPIVADPDMAFMTPEMRAAVRNVAKRFPTAIVTGRCIEKVCSFVGLPELYYAGSHGMDIKGPNSKEDKTVLLLQPAREFLPVIDKAYKALVEKTKDTTGARVENNKFCLSVHFRCVDEKSWSSLAEKVKAVLRDFPELELTEGRKVVEVRPSIMWDKGKAVEFLLRSLGFDDDRTNVLPVYIGDDRTDEDAFKVLRERGQGIGILVSKCPKETDATYSLQDPTEVMEFLVRLGQWNPLRSPSPAARPRGRKQ

SEQ ID NO: 851 - protein, 364 aa, Zea mays
  misc_feature: Public GI ID no. 194702184
  misc_feature (1)..(364): Bit score of 557.6 for hmm based on sequences of FIGURE 9.
  misc_feature (104)..(348): Pfam Name: Trehalose_PPase Pfam Description: Trehalose-phosphatase
  misc_feature: Functional Homolog Of SEQ ID NO. 1129
MTKHGVVIGPEDVAAARHFSFPPPRTAAGGESCRKLAAQVDLGPAVVGSWLDSMKASSPRHRLMAPVPGAADAEHDDWMERHPSALDRFDALAAAAKGKQVAVFLDYDGTLSPIVEDPDRAVMTDEMRDAVRGVAARFPTAIVSGRCRDKVFSFVRLAELYYAGSHGMDIRGPTADANHHHGNGKAEAEAEAVLCQPASEFLPVMQEVYAALVAKVERAIPGAKVEDNKFCLSVHFRCVEEACWAALFEQVRAVLRDHPGLRLTQGRKVLEVRPMIRWDKGKALEFLLHALGFAADADRDDVFPIYVGDDRTDEDAFRVLRARGHGAGILVSRFPKDTSASFTLRDPAEVKEFLRKLVGANDDS

SEQ ID NO: 852 - protein, 357 aa, Zea mays
  misc_feature: Public GI ID no. 194697614
  misc_feature (1)..(357): Bit score of 556.2 for hmm based on sequences of FIGURE 9.
  misc_feature (103)..(337): Pfam Name: Trehalose_PPase Pfam Description: Trehalose-phosphatase
  misc_feature: Functional Homolog Of SEQ ID NO. 1129
MTKRTAFAADDAIIAAAAAVTSQPGRRFTSYPPARARGGCRLAPAVAAAARQATDDPGAAGSWPELVVPRHADFDDWMEKHPSALAAFESVLAAAKGKKIVMFLDYDGTLSPIVRDPDSAVMSEEMRDAVRGVAEHFPTAIVSGRCRDKVFNFVKLAELYYAGSHGMDIKGPTAQSKHTKAKAGAVLCQPARAFLPVIEEVYRALTASTAPIPGATVENNKFCLSVHFRCVQEEKWRALEEQVRSVLKEYPDLRLTKGRKVLEIRPSIKWDKGNALQFLLESLGFAGSNSVFPIYIGDDSTDEDAFKVLRNLGQGIGILVSKIPKETRASYSLREPSEVEEFLRKLVSWSKESRQRD

SEQ ID NO: 853 - protein, 355 aa, Zea mays
  misc_feature: Public GI ID no. 194707094
  misc_feature (1)..(355): Bit score of 547.7 for hmm based on sequences of FIGURE 9.
  misc_feature (101)..(335): Pfam Name: Trehalose_PPase Pfam Description: Trehalose-phosphatase
  misc_feature: Functional Homolog Of SEQ ID NO. 1129
MTKHTAFAADDAIIAAAAAITSQPGRRFTSYPPARARGGCRLAPAAAARQATDDPGAAVSWPELVVPRHADFDDWMEKHPSALAAFESVLAAAKGKKIVMFLDYDGTLSPIVRDPDSAVMSEEMRDAVRGVAEHFPTAIVSGRCRDKVFNFVKLAELYYAGSHGMDIKGPTAQSKHTKAKAGAVLCQPARAFLPVIEEVYRALTASTAPIPGATVENNKFCLSVHFRCVQEEKWRALEEQVRSVLKEYPDLRLTKGRKVLEIRPSIKWDKGNALQFLLESLGFAGSNSVFPIYIGDDSTDEDAFKVLRNLGQGIGILVSKIPKETRASYSLREPSEVEEFLRKLVSWSKESRQRD

SEQ ID NO: 854 - protein, 388 aa, Chlamydomonas reinhardtii
  misc_feature: Public GI ID no. 159488731
  misc_feature (1)..(388): Bit score of 382.1 for hmm based on sequences of FIGURE 9.
  misc_feature (105)..(341): Pfam Name: Trehalose_PPase Pfam Description: Trehalose-phosphatase
  misc_feature: Functional Homolog Of SEQ ID NO. 1129
MWRSYSAAPQGSSPGTSLASLGPGSGVWGPSRASFEQFGDEDSNDGKGRHGGHGGHRAGHSRSPLGGDQSEKDEAYLKWQEKHPCVLAHFASFKAAVDGKRLAVFLDYDGTLTPIVSNPDEAVMSEEMRDVVRSVARAFPTAIISGRGREKVEAFVQLKELFYAGSHGMDIAGPRGGTNGCQVSGNEFVTAFQPAAHFRPLIDHIYTQLQERLKEVPGSSVEHNNFCVSAHFRNCPGEAWQDVISAVEELVAQHDDLRMTRGRKVVEVRPKVDWHKGTALSHLVDALGLAQEPDVVAIYVGDDHTDEDAFRTLEETRRGFGILVSTRAKPTRARYTVRDPACVKDFLSGIVEWSKSDSNGWRAKPCCNGWSMDGLAATGAGPEAPQQQ

SEQ ID NO: 855 - DNA, 1640 bp, Glycine max
  misc_feature: Ceres Clone ID no. 1644562
  misc_feature: Encodes the peptide sequence at SEQ ID NO. 856
cttcaaacctccgcgttttctagtgccttgttgctacttacaccctattgttgaaaagtcaatcccccacaaatccctttttccacatccaccccttctccatttccttccttcaaaacattgcttacccttctcttttttcccccaaagtttcgttcttttgtatcttctctcattcaaagtttgagtcttccgcatttggggtgccctgaattgccgtgcaagttcagatctgcttacagaattcatatttgaatcggtgaagattttgaaaatgatcgtgagaaaaggcatggggcgagcaaagtcactgcttttgctgcttatggtgcttttgttttcctttgccacttataatttggtagctatgatcatggaccataaggcagatgggttggagtctttgaatagaaaaatgatggtatcgggaaagactaattcaaagtttcatgttgccgtgaccgcaaccgatgccgcttacaatcaatggcaatgccggattatgtactattggtataagaaagtgaaggacatgcctggatcagatatggggaaattcacccgtattttgcattctggaaggtcagaccagctgatggatgagattcctacttttgtggttgatccacttcctgagggcttggataagggttatattgtcctaaatagaccatgggcttttgttcagtggctggagaaagcagatattgaggaagaatatattctgatggcagaacctgaccacatatttgtaaagcctttgcctaatttggctcagggaaccctgcccgcagcatttccatttttctatataaaaccagatcagaatgaaaaaataatcaggaaattctatcctgaggaaaacggtcctgttactgatgttgatccaattggcaattctcctgtaatcattaagaagtctttgatggaggaaatagcttccacatgggtaaatgtttcattgagaatgaaagatgatcaagagactgataaagcttttggatgggtgcttgaaatgtatgcttatgctgtggcatctgcattgcatggtgtaaagcataatcttcgcaaagactttatgcttcagccaccttgggacttaaatgttgagaataagtttatcatccactatacatatggatgtgactataatatgaagggggaactgacatatgggaagattggagaatggcgttttgacaagaggtcttatcttttgggtcctccacccaaaaacctgcccttaccgcctccaggagttcctgaaagtgtggtgcggcttgttaaaatggtcaatgaggctactgcaaacatacctgaatgggattcattaaacaaaagctgagggaatgatgataaaccataaagccagtgattttgagatgaggactacaaataccatatcaaaaatagattagtttaagcaaataggagttgtgataaatacaaatgatgcttgtgctttctatgaaaatagatttttttttcttttaatggccaggaaattcttttacattcaaacgtatacaagacctttacaatctattacactgttgtagttttgcaaactgattgttatcatattgcaaccaatggaatggcatcttatcccttttgttttcccccacctttggtggatg

SEQ ID NO: 856 - protein, 356 aa, Glycine max
  misc_feature: Ceres Clone ID no. 1644562
  misc_feature (1)..(356): Bit score of 820.2 for hmm based on sequences of FIGURE 2.
  misc_feature: Functional Homolog Of SEQ ID NO. 489
MIVRKGMGRAKSLLLLLMVLLFSFATYNLVAMIMDHKADGLESLNRKMMVSGKTNSKFHVAVTATDAAYNQWQCRIMYYWYKKVKDMPGSDMGKFTRILHSGRSDQLMDEIPTFVVDPLPEGLDKGYIVLNRPWAFVQWLEKADIEEEYILMAEPDHIFVKPLPNLAQGTLPAAFPFFYIKPDQNEKIIRKFYPEENGPVTDVDPIGNSPVIIKKSLMEEIASTWVNVSLRMKDDQETDKAFGWVLEMYAYAVASALHGVKHNLRKDFMLQPPWDLNVENKFIIHYTYGCDYNMKGELTYGKIGEWRFDKRSYLLGPPPKNLPLPPPGVPESVVRLVKMVNEATANIPEWDSLNKS

SEQ ID NO: 857 - protein, 175 aa, Brassica rapa
  misc_feature: Public GI ID no.119720772
  misc_feature: Bit score of 350.6 for HMM based on sequences of FIGURE 7.
  misc_feature (116)..(156): Pfam Name: zf-AN1 Pfam Description: AN1-like Zinc finger
  misc_feature (16)..(40): Pfam Name: zf-A20 Pfam Description: A20-like zinc finger
  misc_feature: Functional Homolog Of Ceres SEEDLINE ID no. ME04477 at SEQ ID NO. 742
MSSEQNNSTSFPPTEPKLCDNGCGFFGSPSNMNLCSKCYRSLRAEEDQTAVAKAAVEKSLKLPSCSLITAPAPKQPLETKPASVETVVIAETSSVPPVATGQDEGEPSKPARPNRCFSCNKKVGVMGFKCKCGSTFCGSHRYPEKHECSFDFKEVGRGAIAKANPVVKADKVQRI

SEQ ID NO: 858 - DNA, 1207 bp, Glycine max
  misc_feature: Ceres CLONE ID no.708446
  misc_feature: Encodes the peptide sequence at SEQ ID NO 859
tataaatcaggtactaactctttctccttctcccctcatcccaatacccctttatttttttcgttttttttttatggaaaaaaatattgtagcaatttcgtcgtagaaacaaaattcccctattttcggcacgccgttgttgaatttccaatctgtgattttttttcttcttctatttatacgtgataattccaaaaagcctaacgcgagagattcatcagcttttcaattattcctcgaattattttgaaggaatcatccaaactgcttgaaatattcatcatcaacaacctcacgctgttatagatattctctctctctctctccctctctctctctctcacacacacacacacacagatccagacatggccgaagaacaccgatgccaagctcccgaaggtcacagactctgctccaacaactgcggtttctttggtagccccgccaccatgaatctctgttccaaatgctacagagacatccgtttgaaggaagaagaacaagccaaaaccaaatccacaatcgaaaccgctctttcaggatcttcctccgccaccgtcaccgcaaccgccgtcgttgcctcctccgtggaatccccttcggcgccggttgaatccctccctcaaccaccggtgctgatttcgccggatatagccgcaccggttcaggcgaaccggtgcggcgcgtgtaggaagcgcgtggggttgacagggttcaagtgcaggtgcggaacaacgttttgtgggagccacaggtaccccgagaaacacgcgtgtggcttcgatttcaaggcggtggggagagaggagatagcacgggcgaatcccgtgatcaaaggcgagaagctacggaggatttaatctgcgccgttggatgatcgaagcgattagggtgagttgatcaggaccgttcgtcgtggaccgttgatacgaaccgatttcgagcgtgtaaataaaaaaatctattattatgacgacattgggaagggttgaataagtcatattttggtggctttggtttgtgtttgtgcattaaaagtggaaaaatgttaggtccacccacgttcggaaattgaggggtttagaattgaaatgaaatgtaaaaaagtttagtttgattatttttctacggcatttctatttttctagtgggtggcgcgtttgccagaaagggaaattatcgtcggcaaaaaaaaaaaaaaaaa

SEQ ID NO: 859 - protein, 164 aa, Glycine max
  misc_feature: Ceres CLONE ID no.708446
  misc_feature: Bit score of 384.2 for HMM based on sequences of FIGURE 7.
  misc_feature (105)..(145): Pfam Name: zf-AN1 Pfam Description: AN1-like Zinc finger
  misc_feature (13)..(37): Pfam Name: zf-A20 Pfam Description: A20-like zinc finger
  misc_feature: Functional Homolog Of Ceres SEEDLINE ID no. ME04477 at SEQ ID NO. 742
MAEEHRCQAPEGHRLCSNNCGFFGSPATMNLCSKCYRDIRLKEEEQAKTKSTIETALSGSSSATVTATAVVASSVESPSAPVESLPQPPVLISPDIAAPVQANRCGACRKRVGLTGFKCRCGTTFCGSHRYPEKHACGFDFKAVGREEIARANPVIKGEKLRRI

SEQ ID NO: 860 - DNA, 1131 bp, Populus balsamifera subsp. trichocarpa
  misc_feature: Ceres ANNOT ID no.1447260
  misc_feature: Encodes the peptide sequence at SEQ ID NO 842
atggatgtcgagtcaaatcattcttctcctgttctcgctgaccctgcatcgataaacagttcaaggctcggtatctattctaatctgttgccttactcaccaccaggaggatcactctcctctagcaagtatagtaggaaaaagccagggaagcttgacgaagtctgctcgagtggatggctggatgccatgaaatcttcatcaccccctcggaagaagctctttaaggatggttctgacaccgcttacagttcctggatgttcaagcatccatcagcactcaattcatttgaggaaattgcaaattttgctaaaaacaagaagatagcaatgtttctagactatgatgggactctttctccaattgtagatgacccggataatgcgtttatgtctgatgatatgcgttctattgtaaaaaacgttgcgaagtatttcccaacggcgattattagtggaagaagtcgtgacaaggtttatcagctggtaggactaacagaactatattatgctggtagtcatgggatggacattttgggccctgtaggaaaagcttcaatgtccaatgatcatccaaactatagtgaatctactactgaccaacagggcaaggaggtgaatctgttccagcctgctagagaatttatacctatgatcgatgaggtttttagaacccttgtcgagaatactaagggaatcgagggtgcaaaagtcgagaatcacaaattttgtgcctctgtgcatttccgaaatgtagatgaggaggatattctagataagtaccctcgtttgcggagaactcatggacggaaggttttagaggtccgtccaatgattgactggaataaagggaaggcagttgaattcctgcttgaatctctagggctaagtaacagagacgacgtgctctcaatttatatcggcgatgatctgtcagatgaggatgcgttcaaggtgctccgggaggggaatcgaggttatggaattctcgtatcatctagacccaaagaaaccagtgcagtttactctctcaaagatccaattgaggtgatgaaatttcttaactccttggtgacatggaagaaggtagaagaaggtggatgcatcctgaataacaggaggactatctga

SEQ ID NO: 861 - protein, 445 aa, Populus balsamifera subsp. trichocarpa
  misc_feature: Ceres ANNOT ID no.1469023
  misc_feature: Bit score of 931.2 for HMM based on sequences of FIGURE 9.
  misc_feature (125)..(369): Pfam Name: Trehalose_PPase Pfam Description: Trehalose-phosphatase
  misc_feature: Functional Homolog Of Ceres SEEDLINE ID no. ME20095 at SEQ ID NO. 1129
MDLKSNHNAPVLTDSAPLSKSRLRGYHHGLMLPYSPSGAPFSSNLLLSIPRRKTGVLDDVRSCGWLDAMKSSSPTHKKFAKDINHELSAPDPEVAYRTWLLKYPSALASFEQIANFAKGKRIALFLDYDGTLSPIVENPDNAFMSADMRSIVKEVAKYFPTAIISGRSRDKVYEFVGLTELYYAGSHGMDIMGPVRQSVSDDHRNCIKSTDKQGNEVNLFQPAREFLPMIDEVYSSLVRITEDIKGATVENNKFCVSVHYRNVDQDNWKSVGERVQDVIKKYPRLRLTHGRKVLEIRPAINWDKGKALEFLLESLDLSNCDDVLPIYVGDDRTDEDAFKVLRERNCGYGIFVSKSPKESNAYYSLRDPAELENSCLRWTGYPKPEKRWESKIFVVYDDVCVNRDKPLRLDCCQNPSYVARTSLAGVRCTALQVRGPRAVEVVILT

SEQ ID NO: 862 - DNA, 938 bp, Glycine max
  misc_feature: Ceres CLONE ID no.1614593
  misc_feature: Encodes the peptide sequence at SEQ ID NO 863
attctccgttaagattctttcttctttcctctttccactcttggtcttatcttcttcacaatcccacaaccactccttgttataaatcagatccaaacatggccgaagaacaccgatgccaagctcccgaaggtcacagactctgctccaacaactgcggcttcttcggtagccccgccacaatgaatctctgttccaaatgctacagagacatccgtttgaaggaagaagaacaagccaaaactaaatccacaatcgaaaccgctctttctggatcttcctccgccaccgtcgccgttgcctccgccgtggattctcttccggcgccggttgaatccctccctcaaccgtcggtggtgagttcgccagatgtggccgcaccggttcaggcgaaccggtgcggcgcgtgtaggaagcgcgtgggattgactgggtttaagtgcaggtgcggaaccacgttttgtgggactcaccggtaccccgagaaacacgcgtgtggcttcgatttcaaggcggtggggagagaggagatagcacgggcgaatcccgtgatcaaaggcgagaagctacggaggatttaatctgcaccgttgatatgatgatcgaagcgattagggtgagttgatcaggaccgtccgtcgtgggccgttgatacgaacctatttcgagcgtgtgtaagaaaaaaaaaatctattagttatgacgacattgggaagggttgaataagtcatattttggaggctttgctttgtgtttgttcattaaaaatggaaaatgttaggtccacccacgttcggaaattgaggggtttgtttagaattgcaatgcaatgtaaaaaagtgtagtttaatatttttctacaggcatttctatttttcttccgtttgcgagaaaggtaaattatcgtctgcgttgtattcaaaaaaaaaaaaaaaaaa

SEQ ID NO: 863 - protein, 160 aa, Glycine max
  misc_feature: Ceres CLONE ID no.1614593
  misc_feature: Bit score of 375.5 for HMM based on sequences of FIGURE 7.
  misc_feature (101)..(141): Pfam Name: zf-AN1 Pfam Description: AN1-like Zinc finger
  misc_feature (13)..(37): Pfam Name: zf-A20 Pfam Description: A20-like zinc finger
  misc_feature: Functional Homolog Of Ceres SEEDLINE ID no. ME04477 at SEQ ID NO. 742
MAEEHRCQAPEGHRLCSNNCGFFGSPATMNLCSKCYRDIRLKEEEQAKTKSTIETALSGSSSATVAVASAVDSLPAPVESLPQPSVVSSPDVAAPVQANRCGACRKRVGLTGFKCRCGTTFCGTHRYPEKHACGFDFKAVGREEIARANPVIKGEKLRRI

SEQ ID NO: 864 - DNA, 1164 bp, Populus balsamifera subsp. trichocarpa
  misc_feature: Ceres ANNOT ID no.1474186
  misc_feature: Encodes the peptide sequence at SEQ ID NO 865
atggacctcaaatcaaatcacagtgctcctgtgctcactgattctgcacccctaggcaagtcaagactaggtgggcatcatggtttgttcccatgctcaccctcaggcggtgcagctttttcgccgaatctatggttatctattcctaagaagaaaactggagttcttgatgatgttcgctccattggttggctggacgcaatgaaatcatcatctcctcctcacaagaagtttaacaaggatattaacatggagctttcctcgcctgatccggaagctgcctaccgcacttggcttcttaaatatccatctgctcttgcatcttttgagcaaattgcaaactttgcaaaaggcaagagaatcgccttgttcctggattatgatggtactctatcgccgattgtagaaaatcccgacaatgccctcatgtctgatgttatgcgttctgctgtaaagaaagtggcaaaatatttccccacagcaataattagtggaagaagccgtgacaaggtatacgagtttgtaggactcacagaactctattatgcgggtagccatggaatggatattgtgggccctgttaggcactccacatctgatgatcacccaaattgtatcgagtctacggacatgcagggaaatgaagttaatttattccagccagctagagaatttttacctatgatcgacgaggtttttagctcccttctcaagagtaccgaagaaattaaaggtgcaacagttgagaacaataaattctgtgtctctgtacattaccgaaatgttgatgaagataaatggaaagcagtttgggagtgtgtcgaagatgtcattaagaagtaccctcgcctgcgattgacttttgggaggaaggttttagaaattcgtcccacgatcaattgggacaaggggaaagctcttgtgtttctacttgaatcactaggtctcagcaattgtgatgatgtgctccctatttatgttggagatgaccggacagatgaagatgcatttaagattttgagagagaggaactgtggttatgggattctggtatcaaaatcacccaaggaaagcaatgcatattactctctcagggacccatccgaggaaatactcgcaagtggttttgaagcagaggtgcaaagaagagaagacttccattag

SEQ ID NO: 865 - protein, 387 aa, Populus balsamifera subsp. trichocarpa
  misc_feature: Ceres ANNOT ID no.1474186
  misc_feature: Bit score of 896.9 for HMM based on sequences of FIGURE 9.
  misc_feature (124)..(368): Pfam Name: Trehalose_PPase Pfam Description: Trehalose-phosphatase
  misc_feature: Functional Homolog Of Ceres SEEDLINE ID no. ME20095 at SEQ ID NO. 1129
MDLKSNHSAPVLTDSAPLGKSRLGGHHGLFPCSPSGGAAFSPNLWLSIPKKKTGVLDDVRSIGWLDAMKSSSPPHKKFNKDINMELSSPDPEAAYRTWLLKYPSALASFEQIANFAKGKRIALFLDYDGTLSPIVENPDNALMSDVMRSAVKKVAKYFPTAIISGRSRDKVYEFVGLTELYYAGSHGMDIVGPVRHSTSDDHPNCIESTDMQGNEVNLFQPAREFLPMIDEVFSSLLKSTEEIKGATVENNKFCVSVHYRNVDEDKWKAVWECVEDVIKKYPRLRLTFGRKVLEIRPTINWDKGKALVFLLESLGLSNCDDVLPIYVGDDRTDEDAFKILRERNCGYGILVSKSPKESNAYYSLRDPSEEILASGFEAEVQRREDFH

SEQ ID NO: 866 - DNA, 1140 bp, Populus balsamifera subsp. trichocarpa
  misc_feature: Ceres ANNOT ID no.1527596
  misc_feature: Encodes the peptide sequence at SEQ ID NO 867
atggacctcaaatcaaatcacagtgctcctgtgctcactgattctgcacccctaggcaagtcaagactaggtgggcatcatggtttgttcccatgctcaccctcaggcggtgcagctttttcgccgaatctatggttatctattcctaagaagaaaactggagttcttgatgatgttcgctccattggttggctggacgcaatgaaatcatcatctcctcctcacaagaagtttaacaaggatattaacatggagctttcctcgcctgatccggaagctgcctaccgcacttggcttcttaaatatccatctgctcttgcatcttttgagcaaattgcaaactttgcaaaaggcaagagaatcgccttgttcctggattatgatggtactctatcgccgattgtagaaaatcccgacaatgccctcatgtctgatgttatgcgttctgctgtaaagaaagtggcaaaatatttccccacagcaataattagtggaagaagccgtgacaaggtatacgagtttgtaggactcacagaactctattatgcgggtagccatggaatggatattgtgggccctgttaggcactccacatctgatgatcacccaaattgtatcgagtctacggacatgcagggaaatgaagttaatttattccagccagctagagaatttttacctatgatcgacgaggtttttagctcccttctcaagagtaccgaagaaattaaaggtgcaacagttgagaacaataaattctgtgtctctgtacattaccgaaatgttgatgaagataaatggaaagcagtttgggagtgtgtcgaagatgtcattaagaagtaccctcgcctgcgattgacttttgggaggaaggttttagaaattcgtcccacgatcaattgggacaaggggaaagctcttgtgtttctacttgaatcactaggtctcagcaattgtgatgatgtgctccctatttatgttggagatgaccggacagatgaagatgcatttaagattttgagagagaggaactgtggttatgggattctggtatcaaaatcacccaaggaaagcaatgcatattactctctcagggacccatccgaggtacaatttatttttattcgaattactttttaa

SEQ ID NO: 867 - protein, 379 aa, Populus balsamifera subsp. trichocarpa
  misc_feature: Ceres ANNOT ID no.1527596
  misc_feature: Bit score of 894.7 for HMM based on sequences of FIGURE 9.
  misc_feature (124)..(368): Pfam Name: Trehalose_PPase Pfam Description: Trehalose-phosphatase
  misc_feature: Functional Homolog Of Ceres SEEDLINE ID no. ME20095 at SEQ ID NO. 1129
MDLKSNHSAPVLTDSAPLGKSRLGGHHGLFPCSPSGGAAFSPNLWLSIPKKKTGVLDDVRSIGWLDAMKSSSPPHKKFNKDINMELSSPDPEAAYRTWLLKYPSALASFEQIANFAKGKRIALFLDYDGTLSPIVENPDNALMSDVMRSAVKKVAKYFPTAIISGRSRDKVYEFVGLTELYYAGSHGMDIVGPVRHSTSDDHPNCIESTDMQGNEVNLFQPAREFLPMIDEVFSSLLKSTEEIKGATVENNKFCVSVHYRNVDEDKWKAVWECVEDVIKKYPRLRLTFGRKVLEIRPTINWDKGKALVFLLESLGLSNCDDVLPIYVGDDRTDEDAFKILRERNCGYGILVSKSPKESNAYYSLRDPSEVQFIFIRITF

SEQ ID NO: 868 - DNA, 1059 bp, Sorghum bicolor
  misc_feature: Ceres Annot ID no. 8732274
  misc_feature: Encodes the peptide sequence at SEQ ID NO. 869
atgagcgggaggaagaatgcgggcaaggtttccccctggttgctcggcctcatctctttaggatgcttctttgtgacctacaacctcctgacgatgcacggccggggacgggatgggccgcgcaagttcctcggcggcggcgaggatcacgactcaacgggctccggttcggaccccgcgaagcggttccacgtcgcgcttacggcgacggacgcactgtacagtcagtggcagtcgcggataatgcactactggtacaaggagatgagggaccgacctggctctgacatgggtggcttcactaggatccttcactcggggaagcctgatggattgatggatgagatacccaccatggtggttgacccccttcctgaaggcaaggataagggatatattgtcttaaataggccttgggcgtttgtccagtggatccagagagcaaagatcgtagaagattatatactaatggcagagccagatcatgtctttgtgaagcctttgccaaacttagcgcatggtgatgaaccggcagcatttccgtttttctacatcaaaccaactgataatgagaagatattgaggaaattttttccagaagaaaaagggcctgtttcaaatattgatcctattggcaactctccagttataatcaagaaggctcagcttgagaagattgctccaacctggatgaatgtttcattaaaaatgaaagaggatcaggagacagacaaagcatttggatgggtcttggaaatgtatgcatatgcagttgctagtgcactgcatggtgtgcgccatagtctccgtaaagattttatgattcagcctccatgggacctgaaaacggacaacacattcatcatccattatacatatggatgcgattattcaatgaagggtcagctaacttatgggaaaatcggtgaatggcgttttgacaaaagatcttaccttcaatcaccaccaccaagaaatctttctctgccccctccaggagttcctgaaagtgtgattccccgtcacatcgaatctttagacgcatgcatggaatattaa

SEQ ID NO: 869 - protein, 352 aa, Sorghum bicolor
  misc_feature: Ceres Annot ID no. 8732274
  misc_feature (1)..(352): Bit score of 811.3 for hmm based on sequences of FIGURE 2.
  misc_feature: Functional Homolog Of SEQ ID NO. 489
MSGRKNAGKVSPWLLGLISLGCFFVTYNLLTMHGRGRDGPRKFLGGGEDHDSTGSGSDPAKRFHVALTATDALYSQWQSRIMHYWYKEMRDRPGSDMGGFTRILHSGKPDGLMDEIPTMVVDPLPEGKDKGYIVLNRPWAFVQWIQRAKIVEDYILMAEPDHVFVKPLPNLAHGDEPAAFPFFYIKPTDNEKILRKFFPEEKGPVSNIDPIGNSPVIIKKAQLEKIAPTWMNVSLKMKEDQETDKAFGWVLEMYAYAVASALHGVRHSLRKDFMIQPPWDLKTDNTFIIHYTYGCDYSMKGQLTYGKIGEWRFDKRSYLQSPPPRNLSLPPPGVPESVIPRHIESLDACMEY

SEQ ID NO: 870 - protein, 375 aa, Zea mays
  misc_feature: Public GI ID no. 194692712
  misc_feature (1)..(375): Bit score of 910.8 for hmm based on sequences of FIGURE 2.
  misc_feature: Functional Homolog Of SEQ ID NO. 489
MDAAVRKAAGAGIARAPALVLALVAAGAFLISYNFFTMLFHGGGGIGAAVTAGTRDPVVAMPAWMRAAADTEARRRPFHVALTATDAPYSRWQCRVMYFWYKRMQARPGGEAMGGFTRVLHSGKPDGLMDEIPTFVVDPLPAGKDHGYVVLNRPWAFVQWLQKAKIEEEYILMAEPDHIFVKPLPNLAHDDDPAAFPFFYITPSEHEKIIRKYYAKERGPVTDIDPIGNSPVIIKKTILEKIAPTWMNVSIQMKEDEETDKVFGWVLEMYAYAVASALHGVHHILRKDFMIQPPFDTKLQNTFIIHFTYGCDYSLKGELTYGKVGEWRFDKRSFPDRPPPRNLTLPPPGVPESVVTLVKMVNEASANLPRWDDGI

SEQ ID NO: 871 - protein, 360 aa, Vitis vinifera
  misc_feature: Public GI ID no. 157346787
  misc_feature (1)..(360): Bit score of 876.5 for hmm based on sequences of FIGURE 2.
  misc_feature: Functional Homolog Of SEQ ID NO. 489
MIVRKSMGRASLLLLVLLALGFFFATYNLLTMIMHNRGSDDFDVFDPITRMTKETKKVGNRNLYFHVALTATDAPYSQWQCRIMYYWYKKVKDMPGSEMGGFTRVLHSGSPDSLMDEIPTFVVYPLPDGLDRGYIVLNRPWAFVQWLEKATIEEEYILMAEPDHIFVNPLPNLAHGGHPAGFPFFYIKPADNEKIIRKFYPKEKGPVTDVDPIGNSPVIIEKSQLEEIAPTWMNISLRMKDDPETDKAFGWVLEMYAYAVASALHGVQHILRKDFMLQPPWDLEVGKKFIIHYTYGCDYNLKGELTYGKIGEWRFDKRSFLSGPPPKNLTLPPPGVPESVVRLVQMVNEATANIPGWDVE

SEQ ID NO: 872 - protein, 310 aa, Vitis vinifera
  misc_feature: Public GI ID no. 157351855
  misc_feature (1)..(310): Bit score of 781.6 for hmm based on sequences of FIGURE 2.
  misc_feature: Functional Homolog Of SEQ ID NO. 489
MPENVRKPKNAKLPFHIALTATDAPYSKWQCRIMYYWYKKKKDLPGSEMGGFTRILHSGSPDNLMEEIPTFVVDPLPAGLDRGYIVLNRPWAFVQWLEKATIEEEYILMAEPDHIFIKPLPNLAHGDYPAAYPFFYIKPVQNEKIIRKFYPEEHGPVTNVDPIGNSPVIIKRELLEKIAPTWMNVSLRMKDDPETDKVFGWVLEMYAYAVASALHGVQHILQKDFMLQPPWDLETAKKFIIHYTYGCDYNLKGELTYGKIGEWRFDKRSYLRGPPPRNLSLPPPGVPESVVTLVKMVNEATANLPRWDTQ

SEQ ID NO: 873 - protein, 364 aa, Vitis vinifera
  misc_feature: Public GI ID no. 157339761
  misc_feature (1)..(364): Bit score of 745.1 for hmm based on sequences of FIGURE 2.
  misc_feature: Functional Homolog Of SEQ ID NO. 489
MGCGNFFYVLLITFSVALITYNILISANAPLKQGFPGHPSSSSTPFSVDPIIKMPTDRSNPSSTKGKRLFHTAVTASDSVYNTWQCRVMYYWFKKFKDGPNSEMGGFTRILHSGKPDKFMHEIPTFVAQPLPAGMDQGYIVLNRPWAFVQWLQQADIKEDYILMAEPDHIIVKPIPNLSRDGLGAAFPFFYIQPKQYESTLRKFYPEEKGPITNVDPIGNSPVIVGKESLKKIAPTWMNVSLAMKKDPEADKTFGWVLEMYAYAVASALHDVGNILFKDFMIQPPWDTEIGKKFIIHYTYGCDYNMQGELTYGKIGEWRFDKRSFDSKWPPRNLPLPPPGVPESVVTLVKMVNEATANIPNWGS

SEQ ID NO: 874 - protein, 351 aa, Physcomitrella patens subsp. patens
  misc_feature: Public GI ID no. 168039081
  misc_feature (1)..(351): Bit score of 756.4 for hmm based on sequences of FIGURE 2.
  misc_feature: Functional Homolog Of SEQ ID NO. 489
MVVTYNTITMINSYHNRSDLIDSRAGEEDDDNQFAFDPLIRMPKDMKRNGPKRLFHVAVTANDSPYNRWQCRIMYYWYKKFKDAPGSEMGGFTRILHSGKADNFMDEIPTVVVDPLPDGEDRGYIVLNRPWAFVQWLRKADIPEDYILMAEPDHIFIRPLPNLATEEMPAAFKFFYIVPTENEKVLRKFFPNEKGPIANIDPIGNSPVIIKKSQLEKIAPTWSDVSIKMKDDPETDKAFGWVLEMYGYATASALHGIRHMLVKDFMLQPPWDTDLGNKYIIHYTYGCDYNMQGKLTYGKIGEWRFDKRSFTTGAPPKNLTLPPPGVPETVVTLVKMVNEATASIPGWKGGE

SEQ ID NO: 875 - DNA, 1431 bp, Sorghum bicolor
  misc_feature: Ceres Annot ID no. 8733731
  misc_feature: Encodes the peptide sequence at SEQ ID NO. 876
atggagggttgcaactcgcacggcggtggcggcggcggaggaggaggaggaggaggaggagggtcgagctcgccgccgccgttcctcatcaagacctacgagatggtggaggacccggcgacgaaccacgtggtgtcgtggggacccggcggcgccagcttcgtggtgtggaacccgccggacttctcgcgggacctgctgcccaagtacttcaagcacaacaacttctccagcttcatcaggcagctcaacacatacggtttccgaaagatcgatccagagagatgggagtttgccaacgacgacttcatacggggacacacgcaccttctgaagaacatccaccggcgcaaaccggtgcacagccactcgctgcagacgcaggtgaacgggccattagcggagtccgagaggcgcgagcttgaggacgagatcaacaggctcaagtacgagaagagcctgctgctggcagatctccagaggcagaaccagcagcggtgcgggatcagctggcagatgcagtcgctggagagcaggctggtggcgatggaggagcgccagaggcacatcgtggcgtccctgtgtgacatcctgcagagacacggggttgttccgggctcgacgacgacgacgctggagatggagacgccggcggaccacttcagcaagaagaggagggtgccgaagttcggtttcttcgtcgacgccgacgaacccaaggtggaagaacagcaggtgccgtcgttcctgcagacggtgggaggagtagtagcagagacaccaggcatgtctccgatccgccttttgaatgatgagccgtttgagaagatggagctggccttggtgtcgctggagaatttcttccagagggcaacccattcgcctgctgccaatgacattgacatgtacgctggtggtgctgctgaaccacccagccctgctctgagtctcggggagatgttctcagtctcagcaccaatggataccagtatcaatctgcagtcatcagctcgccactgccagaatccctttgcttccacctcagggcaagaccagtcgtcatctccattggcacaagcagaacctccgagctacgacgcccggagcccgatcctgccattggcacagctccatgaatatgcccctagggcagctgaagtcgatatgaactctgacaccacaactggcgacacttcacaagatgagaccaccagtgaaactgaaggttcccatttgccggccaaggcgaacgatatattctgggagcagtttctcaaagacgaagagggtaaaatagaagcaaaggaagatgtgaagactgccgtagaccgcagctgtcgtcgtctacaggacaatgttgatcagatcactgagcagatggggcagctcgattcagctgagaacggctcttatgcaccccagacttactga

SEQ ID NO: 876 - protein, 476 aa, Sorghum bicolor
  misc_feature: Ceres Annot ID no. 8733731
  misc_feature (1)..(476): Bit score of 71.4 for hmm based on sequences of FIGURE 12.
  misc_feature (26)..(194): Pfam Name: HSF_DNA-bind Pfam Description: HSF-type DNA-binding
  misc_feature: Functional Homolog Of SEQ ID NO. 311
MEGCNSHGGGGGGGGGGGGGGSSSPPPFLIKTYEMVEDPATNHVVSWGPGGASFVVWNPPDFSRDLLPKYFKHNNFSSFIRQLNTYGFRKIDPERWEFANDDFIRGHTHLLKNIHRRKPVHSHSLQTQVNGPLAESERRELEDEINRLKYEKSLLLADLQRQNQQRCGISWQMQSLESRLVAMEERQRHIVASLCDILQRHGVVPGSTTTTLEMETPADHFSKKRRVPKFGFFVDADEPKVEEQQVPSFLQTVGGVVAETPGMSPIRLLNDEPFEKMELALVSLENFFQRATHSPAANDIDMYAGGAAEPPSPALSLGEMFSVSAPMDTSINLQSSARHCQNPFASTSGQDQSSSPLAQAEPPSYDARSPILPLAQLHEYAPRAAEVDMNSDTTTGDTSQDETTSETEGSHLPAKANDIFWEQFLKDEEGKIEAKEDVKTAVDRSCRRLQDNVDQITEQMGQLDSAENGSYAPQTY

SEQ ID NO: 877 - DNA, 1167 bp, Solanum lycopersicum
  misc_feature: Ceres Annot ID no. 8458120
  misc_feature: Encodes the peptide sequence at SEQ ID NO. 878
atggataactgtaatggaggatcaagttcttcttctccggcgccttttttgttgaaaacttatgaactggttgatgattcgtatactaatccagttgtttcatggagccataacggacgtagcttcgttgtttggaatccacctgaattcgctagagatttgcttccgaaatactttaagcataacaatttctcaagttttatcagacaacttaatacttatgggtttagaaaggttgatcctgaacaatgggagtttgcgaacgaggattttttaagaggacgtagacatttgttgaagaatatttatagacgaaagccgatccatagccactctgctgcagcaggaacagggcaatctgtagctccattgacggattctgagagacaggagtatgaagatgaaatcgagaggttgaagagagaaaacagtcttcttcagtcgtctgcggagaatcaattgaaattcaatggggagtacgaaagtggaattaagtctatggagcaacgtttacagaacgttgctcatagacaggggaaattgatttctcttttagctcaattactacaaacacctggattttcatctgatttcactcaaagcgcgagcaggaagagacgattgttgatatcaaattacttgattgacgaggaaaactcaccaaaattcgacttggaaatggttaaaaagttggattcatcaatcaatttttgggagcggtttctgtatggtgttcaaacacaagatttcgagcatacacattccccaattgttacacatacatcatctaatgattctgccaaacgaaactctcccatcgatcattcaccatcctcctccgagttagggccattgaatcctgtcatgtcatcaacttatgaaaatttagaacgtcaacttaagccatctgataatcagattgagtgtaagaccagtaaaacatctgaattagtatcaaactcgggtaatgatgtattttggcaacagttcttaacagagacgcctggttgcactgagccacaacaagttgagaacaaagggataaacgaatcaacgcgtgatattagattaggggatagccatagatattggtggaatcgcggagttaatttagaaaatcttgctgaaagaatgggacatcttagtagtccagcaacaggaagctga

SEQ ID NO: 878 - protein, 388 aa, Solanum lycopersicum
  misc_feature: Ceres Annot ID no. 8458120
  misc_feature (1)..(388): Bit score of 64.1 for hmm based on sequences of FIGURE 12.
  misc_feature (13)..(185): Pfam Name: HSF_DNA-bind Pfam Description: HSF-type DNA-binding
  misc_feature: Functional Homolog Of SEQ ID NO. 311
MDNCNGGSSSSSPAPFLLKTYELVDDSYTNPVVSWSHNGRSFVVWNPPEFARDLLPKYFKHNNFSSFIRQLNTYGFRKVDPEQWEFANEDFLRGRRHLLKNIYRRKPIHSHSAAAGTGQSVAPLTDSERQEYEDEIERLKRENSLLQSSAENQLKFNGEYESGIKSMEQRLQNVAHRQGKLISLLAQLLQTPGFSSDFTQSASRKRRLLISNYLIDEENSPKFDLEMVKKLDSSINFWERFLYGVQTQDFEHTHSPIVTHTSSNDSAKRNSPIDHSPSSSELGPLNPVMSSTYENLERQLKPSDNQIECKTSKTSELVSNSGNDVFWQQFLTETPGCTEPQQVENKGINESTRDIRLGDSHRYWWNRGVNLENLAERMGHLSSPATGS

SEQ ID NO: 879 - DNA, 1963 bp, Panicum virgatum; identical to SEQ ID NO: 778
  misc_feature: Ceres Clone ID no. 1862704
  misc_feature: Encodes the peptide sequence at SEQ ID NO. 880

SEQ ID NO: 880 - protein, 521 aa, Panicum virgatum; identical to SEQ ID NO: 779
  misc_feature: Ceres Clone ID no. 1862704
  misc_feature (1)..(521): Bit score of 1110.0 for hmm based on sequences of FIGURE 12.
  misc_feature (51)..(226): Pfam Name: HSF_DNA-bind Pfam Description: HSF-type DNA-binding
  misc_feature: Functional Homolog Of SEQ ID NO. 311

SEQ ID NO: 881 - DNA, 1882 bp, Arabidopsis thaliana
  misc_feature: Ceres Clone ID no. 146737
  misc_feature: Encodes the peptide sequence at SEQ ID NO. 882
aacacttgagagagtctctgtctctgtaaaagatatttgagcttgagaagaacagaagaaacttccaggatcaatcaatcgatcaactttagtgaactaactcttgatttttcattcgaagttatggaatcggttcccgaatccgtaccatcgccgaactcgaatacaccgtcaataccaccgccggtgaactccgtaccgcctttcttgagtaaaacctacgacatggttgatgatccgttgaccaatgaggtcgtttcgtggagcagcgggaacaacagcttcgtcgtctggagtgtcccggagttctcgaaggtgctcttgcccaagtatttcaagcacaacaacttctccagcttcgtcagacagttaaatacttatggtttcagaaaagttgatcctgaccgatgggaatttgcaaatgaaggatttcttagaggccgaaaacaactactgaagagtattgtcaggagaaaaccttcgcatgtgcagcagaatcagcaacaaactcaagttcagagctcatctcttggtgcttgtgtcgaggtggggaagtttggaatagaagaagaagtggaaagacttaagcgggataagaatgttcttatgcaagaactcgtcaggttaaggcagcaacagcaagctactgaaaaccaactgcagaatgtgggacagaaagttcaggtgatggagcaaaggcaacaacaaatgatgtcgtttttagcaaaggctgttcaaagtccaggtttcttaaaccagttagtacaacagaataataatgatggcaacagacaaattccaggaagcaacaaaaagaggagacttcctgtagatgagcaggagaatcgtggcgacaatgtggctaatggtcttaaccgccagattgttagatatcagccgtcgataaacgaagcagcacaaaatatgcttcgacagttcttaaatactagtacctcacctcggtatgaatcagtttcaaacaatcctgacagtttcctattgggtgatgttcccagttctacctctgtagacaatgggaacccttcaagtagagtttctggagtaacattggccgagttttcacccaacacagttcagtcagcaacgaatcaagtacccgaagcaagtttggctcatcatcctcaagctggtctggttcagccaaatataggtcaaagtccggctcaaggagcagcacctgcagactcttggagccctgaatttgatttagttggatgcgagacagatagtggagagtgttttgatccaataatggctgttttagatgagtcagaaggcgatgcaatttctcctgaaggtgagggaaagatgaatgagttactggagggagtccctaagctgcccggaatccaagatccattctgggaacagttcttttctgttgaactcccagcgattgcagatacagacgagattctatcaggatcagtggagaataatgacttggtaatggaacaagaaccaaacgagtggacccgtaatgaacaacaaatgaagtatcttactgaacaaatgggactgctttcctcagaagcacagaggaaataaaggggaggttgcgaaaggagatatcaaggaaggaggaatatatcagatggtgtgtataccctttacatttttacttaaatgaagaaaaaaaacagagagaagaaacataaaagatttaccaccaagcttgtgaatagttagtagagatcggtttttgtgttgtttatattatacttttgtgtgaaaacgttcatcttgttcaattatcatctcagtagtacggtaatctgttggtcactgaccggttaatgaccaaaaaatcaagattattttcttatgtttatttcttttgatcatgaagatccttatgacg

SEQ ID NO: 882 - protein, 481 aa, Arabidopsis thaliana
  misc_feature: Ceres Clone ID no. 146737
  misc_feature (1)..(481): Bit score of 669.4 for hmm based on sequences of FIGURE 12.
  misc_feature (26)..(200): Pfam Name: HSF_DNA-bind Pfam Description: HSF-type DNA-binding
  misc_feature: Functional Homolog Of SEQ ID NO. 311
MESVPESVPSPNSNTPSIPPPVNSVPPFLSKTYDMVDDPLTNEVVSWSSGNNSFVVWSVPEFSKVLLPKYFKHNNFSSFVRQLNTYGFRKVDPDRWEFANEGFLRGRKQLLKSIVRRKPSHVQQNQQQTQVQSSSLGACVEVGKFGIEEEVERLKRDKNVLMQELVRLRQQQQATENQLQNVGQKVQVMEQRQQQMMSFLAKAVQSPGFLNQLVQQNNNDGNRQIPGSNKKRRLPVDEQENRGDNVANGLNRQIVRYQPSINEAAQNMLRQFLNTSTSPRYESVSNNPDSFLLGDVPSSTSVDNGNPSSRVSGVTLAEFSPNTVQSATNQVPEASLAHHPQAGLVQPNIGQSPAQGAAPADSWSPEFDLVGCETDSGECFDPIMAVLDESEGDAISPEGEGKMNELLEGVPKLPGIQDPFWEQFFSVELPAIADTDEILSGSVENNDLVMEQEPNEWTRNEQQMKYLTEQMGLLSSEAQRK

SEQ ID NO: 883 - DNA, 1619 bp, Zea mays; identical to SEQ ID NO: 788
  misc_feature: Ceres Clone ID no. 229513
  misc_feature: Encodes the peptide sequence at SEQ ID NO. 886

SEQ ID NO: 884 - DNA, 558 bp, Panicum virgatum
  misc_feature: Ceres CLONE ID no.1821214
  misc_feature: Encodes the peptide sequence at SEQ ID NO. 1189
  misc_feature (242)..(242): n is a, c, t, g, unknown, or other
  misc_feature (243)..(243): n is a, c, t, g, unknown, or other
  misc_feature (403)..(403): n is a, c, t, g, unknown, or other
  misc_feature (404)..(404): n is a, c, t, g, unknown, or other
  misc_feature (405)..(405): n is a, c, t, g, unknown, or other
aaacccatttccttcctgcctccaccttccagcccaggcccggcggtgcctctccctctcgtctccggatcggcaagagcccagctgctgccggattcacacgacacctcgtcgtctctctctctctctctctctctctctctctctctctctctctctctctctccggccatggcgcagcgcgacaagaaggtggaggagccgacggagctgcacgcgccggagctcacgctctgcgccgnnagctgcggcttcccgggcaacccggcgaccaacaacctctgccagaactgcttcgtggccgcctcggcctcagtgtcgcctttttttccctcctcctcctcctcggcgccctcgccggcagtgttcgacaagccgcggccggcagtcgcccctaccgccnnntggccgccgttccccgcggccgccgaccggcccccggcgggccccgcggagtccctctccgaggcgccccggacgtcgccgtcagtcacccggggccacagctgtcgaaagccggtcgggctgacagggtcccggggtcgctgccgcgagctc

SEQ ID NO: 885 - protein, 109 aa, Panicum virgatum
  misc_feature: Ceres CLONE ID no.2025938
  misc_feature: Bit score of 100.8 for HMM based on sequences of FIGURE 7.
  misc_feature (18)..(42): Pfam Name: zf-A20 Pfam Description: A20-like zinc finger
  misc_feature (98)..(109): Pfam Name: zf-AN1 Pfam Description: AN1-like zinc finger
  misc_feature: Functional Homolog Of Ceres SEEDLINE ID no. ME04477 at SEQ ID NO. 742
MAQRDKKEEPTELRAPEITLCANNCGFPGNPATQNLCQSCFSAATASMSSPTSSSSSPAPAPAAAPQPRPAPVELASPADAAVAAPAPEAARTPANRCSSCRKRVGLTG

SEQ ID NO: 886 - protein, 417 aa, Zea mays; identical to SEQ ID NO: 789
  misc_feature: Ceres Clone ID no. 229513
  misc_feature (1)..(417): Bit score of 142.9 for hmm based on sequences of FIGURE 12.
  misc_feature (49)..(226): Pfam Name: HSF_DNA-bind Pfam Description: HSF-type DNA-binding
  misc_feature: Functional Homolog Of SEQ ID NO. 311

SEQ ID NO: 887 - protein, 496 aa, Vitis vinifera; identical to SEQ ID NO: 753
  misc_feature: Public GI ID no. 157341912
  misc_feature (1)..(496): Bit score of 1165.6 for hmm based on sequences of FIGURE 12.
  misc_feature (33)..(209): Pfam Name: HSF_DNA-bind Pfam Description: HSF-type DNA-binding
  misc_feature: Functional Homolog Of SEQ ID NO. 311

SEQ ID NO: 888 - protein, 489 aa, Picea sitchensis
  misc_feature: Public GI ID no. 116787265
  misc_feature (1)..(489): Bit score of 361.3 for hmm based on sequences of FIGURE 12.
  misc_feature (65)..(244): Pfam Name: HSF_DNA-bind Pfam Description: HSF-type DNA-binding
  misc_feature: Functional Homolog Of SEQ ID NO. 311
MVECGVLMCVCVGVFCRSLIMDSQNSGISAGDEVNLGNFNVKEEESMQMPRCPRPMEGLHCAGPPPFLTKTYDMVEDPLTDTVVSWSSTNNSFVVWNSHLFSSDLLPKYFKHNNFSSFVRQLNTYGFRKVDPDRWEFANEGFLRGQKHLLKLIQRRKPSCPPQFIDNLHHHHQQDQQQGMGACVEVGQFGMVGEIEGLRRDKSVLMLEVVKLRQQQQSTRNQLQTIGHRLQSTEQRQQHMMTFLARAIQNPTFLAQLSQNKQASKRLATSKKRRRLPKGEAQQDLPSFPASEGRIVKYQSSTSTPADSDHTQNSSNLEAFLSTMGHVDSPDMPTPHKTFQDREQDESSSSISMIAEQLYGFEPGSAFDISMPVDIPIETASAFDRNSVNLVGAEGEEDLDLENVNDVFWEELLNEHFDSQDDSGTEAEANFPDQDKGNFSSSSRSDVNLLAEQMGLTAFHQSIPIIPEKLIALESGLVSHSNLKNPSYF

SEQ ID NO: 889 - protein, 442 aa, Vitis vinifera
  misc_feature: Public GI ID no. 157344554
  misc_feature (1)..(442): Bit score of 180.2 for hmm based on sequences of FIGURE 12.
  misc_feature (13)..(182): Pfam Name: HSF_DNA-bind Pfam Description: HSF-type DNA-binding
  misc_feature: Functional Homolog Of SEQ ID NO. 311
MEASQSTSSNSPPPFLTKTYEMVDDPITDSIVSWSQAGHSFVVWNPPEFAKDLLPKYFKHNNFSSFVRQLNTYGFRKADPEQWEFANEEFIRGQRHLLKNIHRRKPIHSHSTQNQVGSAPLPESEKQEFEAEIERLKHDKGALLSELQRYKQENQFFEFQTQSLGKRVFNMELRQRKMMAYLAQVLQKPGFTSSLMAQSEIHNKKRRLLMPNYLFNEANVEENMVVTFQKEKPDTISVQGENVEMIESLESSLNFWENFLYGIGQGSADVMDGFGTLSQPSPLIITEMHSSSDPDTSTQPCSPKSYPSSPHSRDIHSSPELARATNHADSPAISSIYLNIDGCPKSLRIDVNSEPTNASEVEASKECEGGTTAAGANDVFWAQFLTETPGSSDAQEVQSERRDAYGGKGDSKPDDHRKYWWDTNNLDHLTKKMGHLTSSERT

SEQ ID NO: 890 - protein, 407 aa, Zea mays; identical to SEQ ID NO: 768
  misc_feature: Public GI ID no. 194693220
  misc_feature (1)..(407): Bit score of 160.6 for hmm based on sequences of FIGURE 12.
  misc_feature (49)..(226): Pfam Name: HSF_DNA-bind Pfam Description: HSF-type DNA-binding
  misc_feature: Functional Homolog Of SEQ ID NO. 311

SEQ ID NO: 891 - protein, 415 aa, Vitis vinifera
  misc_feature: Public GI ID no. 157339031
  misc_feature (1)..(415): Bit score of 146.9 for hmm based on sequences of FIGURE 12.
  misc_feature (12)..(186): Pfam Name: HSF_DNA-bind Pfam Description: HSF-type DNA-binding
  misc_feature: Functional Homolog Of SEQ ID NO. 311
MVKSTEAGSVVPPFLKKCYEMVDDEASDAIISWNLSNDSFVIRDTTEFSHQLLPKYFKHNNFSSFMRQLNIYGFRKIDTDHWEFANEGFIRGQKHLLKNIRRRKQLQGQDKQKSSHQRDKSAGACEEIEASKLWNDVEILKTDRNALTQQLVKLRQHQETAESKLLVLRERLQGMEKNQQQMLSFLVMAMQSPEFLVQFMQPKEKNWRMAEVGKNMLERRAENGEPAASDVMIVRYQPPMDETPKPLPIPTSNSEKSLESDGMIVRYQPPMDETAKPLLMAKSNSEKSLESDFFMNIDFMKILMDGNMGSSEHQEPLILPDLPDDDILDQLLLENFADAKLDNQQAPIDSGMVMDPTVNQTQLDEPQHFELLNLEQKMPLKRMEKPYELEVESTLHGTRFEKSQHSELLTEQMGQ

SEQ ID NO: 892 - protein, 170 aa, Medicago truncatula
  misc_feature: Public GI ID no.92896423
  misc_feature: Bit score of 368.4 for HMM based on sequences of FIGURE 7.
  misc_feature (11)..(35): Pfam Name: zf-A20 Pfam Description: A20-like zinc finger
  misc_feature (111)..(151): Pfam Name: zf-AN1 Pfam Description: AN1-like Zinc finger
  misc_feature: Functional Homolog Of Ceres SEEDLINE ID no. ME04477 at SEQ ID NO. 742
MAEEHRCQAAQRLCANNCGFFGSPAMQDLCSKCYRDLQMKEQRSSSAKLVLNQTLIPQQSNSSSLDTGIIHPSSTSPSVMIVSSSTPTVELVAAAAGPSEAEPPKVQPNRCGTCRRRVGLTGFKCRCGLTLCGTHRYPEQHGCGFDFKGMGREEIKKANPVVKGEKLNKI

SEQ ID NO: 893 - protein, 408 aa, Zea mays; identical to SEQ ID NO: 769
  misc_feature: Public GI ID no. 194708220
  misc_feature (1)..(408): Bit score of 140.4 for hmm based on sequences of FIGURE 12.
  misc_feature (49)..(226): Pfam Name: HSF_DNA-bind Pfam Description: HSF-type DNA-binding
  misc_feature: Functional Homolog Of SEQ ID NO. 311

SEQ ID NO: 894 - protein, 408 aa, Zea mays; identical to SEQ ID NO: 774
  misc_feature: Public GI ID no. 194689430
  misc_feature (1)..(408): Bit score of 140.1 for hmm based on sequences of FIGURE 12.
  misc_feature (49)..(226): Pfam Name: HSF_DNA-bind Pfam Description: HSF-type DNA-binding
  misc_feature: Functional Homolog Of SEQ ID NO. 311

SEQ ID NO: 895 - DNA, 1450 bp, Gossypium hirsutum
  misc_feature: Ceres CLONE ID no.1919624
  misc_feature: Encodes the peptide sequence at SEQ ID NO 896
actactcctagtcattttgtcattgccattgttatcttctctgttttttttcttcactctcttcagaacaagttaagaaagaagaatgactaaccaacaaaatgtggtggttgtggatgtgaaaccccatggtgctgttaagccaccattatcatttccagtggccaagtccttttcaccacaagacctgaagttattgttaatgaagaaaaggttcgaaactgagaatgcttgggtactggattccatgagagcttcttcacctactcgtatcagcaaccctactacgacttccttacctgaaactgatgtcaaaagttcctggattgtccatcatccctcagctttgaacatgtttgaacaaatagtgactgcttcagaagggaaacagattgcgatgttccttgactacgatggcacactgtcaccaatcgttgaagacccggatcgagctttcatgcccagagagatgagagcagctgtaagagatgttgcaagatattttcctactgcaatactcaccggaagatgcagagacaaggtttacagctttgtaaaactatctggactttattatgctggtagccatggtatggatatcaagggaccatccaaaagttgcaaagacaataataatggtaagcagggagtgcttttccagcctgcaagtgaattcttgcccatgattgatgaggtgtacaaagcattggtagagaaaacaaattccattccaggagccaaggtggaaaacaacaagttttgtgtttccgtacactatcgatgtgttgatgaaaagagttgggctacaatagctgagcaagttagatcagtgctgaaccactaccctaagcttaaattaactcaagggaggaaggtattagagatacgtcccactatcaaatgggacaaagggagagcccttgaatttttgttggaagcactaggatataacaatgcaaatgatgttttaccaatttatatcggcgatgatcgaactgatgaagatgctttcaaggttttacgtgatagaggactaggatttgggattttggtttcaaaaatacccaaagaaactaatgcatcctattctctccaagaaccatcggaggcacgatttattactaattttggcatattttgctcttctttaatttaaatatatttttggtctataattgttcataaaaacataattattttcaggttaaggagttcttgcgacgtttggtggagtggaaaaagttgtcgctacaaacacccataattggctaaaattaagtgcttatagaggaccttgctgaattatttaatgttctggtttagagagagtttttataattgtaattaaataccagtgttcagaggctgataaaaaagaaaaaagaaaaaaaagaattgttccattaatttggaaattctttaaatcgaccaaaaaaaaaaaaaaaaaaaa

SEQ ID NO: 896 - protein, 356 aa, Gossypium hirsutum
  misc_feature: Ceres CLONE ID no.1919624
  misc_feature: Bit score of 640.2 for HMM based on sequences of FIGURE 9.
  misc_feature (106)..(340): Pfam Name: Trehalose_PPase Pfam Description: Trehalose-phosphatase
  misc_feature: Functional Homolog Of Ceres SEEDLINE ID no. ME20095 at SEQ ID NO. 1129
MTNQQNVVVVDVKPHGAVKPPLSFPVAKSFSPQDLKLLLMKKRFETENAWVLDSMRASSPTRISNPTTTSLPETDVKSSWIVHHPSALNMFEQIVTASEGKQIAMFLDYDGTLSPIVEDPDRAFMPREMRAAVRDVARYFPTAILTGRCRDKVYSFVKLSGLYYAGSHGMDIKGPSKSCKDNNNGKQGVLFQPASEFLPMIDEVYKALVEKTNSIPGAKVENNKFCVSVHYRCVDEKSWATIAEQVRSVLNHYPKLKLTQGRKVLEIRPTIKWDKGRALEFLLEALGYNNANDVLPIYIGDDRTDEDAFKVLRDRGLGFGILVSKIPKETNASYSLQEPSEARFITNFGIFCSSLI

SEQ ID NO: 897 - protein, 459 aa, Oryza sativa subsp. indica
  misc_feature: Public GI ID no. 166787940
  misc_feature (1)..(459): Bit score of 102.9 for hmm based on sequences of FIGURE 12.
  misc_feature (19)..(187): Pfam Name: HSF_DNA-bind Pfam Description: HSF-type DNA-binding
  misc_feature: Functional Homolog Of SEQ ID NO. 311
MESSNLGGGGGGGGGGGPPPFLIKTYEMVEDAATNHVVSWGPGGASFVVWNPLDFSRDLLPKYFKHNNFSSFIRQLNTYGFRKIDPERWEFANEDFIRGHTHLLKNIHRRKPVHSHSLQNQINGPLAESERRELEEEINRLKYEKSILVADLQRQNQQQYVINWQMQAMEGRLVAMEQRQKNIVASLCEMLQRRGGAVSSSLLESDHFSKKRRVPKMDLFVGDCAAGEEQKVFQFQGIGTDAPAMPPVLPVTNGEAFDRVELSLVSLEKLFQRANDACTAAEEVYSHGHGGTEPSTAICPEEMNTAPMETGIDLQLPASLHPSSPNTGNAHLHLSTELTESPGFVQSPELPMAEIREDIHVTRYPTQADVNSEIASSTDTSQDGTSGTEASHGPTNDVFWERFLTETPRSCLDESERQESPKDDVKAELGCNGFHHREKVDQITEQMGHLASAEQTLHT

SEQ ID NO: 898 - protein, 435 aa, Pennisetum glaucum
  misc_feature: Public GI ID no. 169637055
  misc_feature (1)..(435): Bit score of 60.6 for hmm based on sequences of FIGURE 12.
  misc_feature (12)..(176): Pfam Name: HSF_DNA-bind Pfam Description: HSF-type DNA-binding
  misc_feature: Functional Homolog Of SEQ ID NO. 311
MEAGGGGASSLPPFLSKTYEMVDDPATDAVVAWTPPGTSFVVVNRAEFCRDLLPKYFKHNNFSSFVRQLNTYGFRKVDPEQWEFLNDDFIRGQRHRLKNIHRRKPIFSHSSHPHGSGPLADNERREYEEEIEKLKRDNDALTLELEKNAQKKIDMERRMQELEDKLICLEDRQKNLIAYVRDIVQAPGFRSSFVQQPDHHGKKRRLPIPISLHQDENAEGNQIVHGALTNPLVCIESFDKMESSLNSLENFFREASGAFDISYDGGVPGPSSAVVITELHSSGESDPRVPSPPSRMHTSSAGAGDSLSSHDVTESTSCAESPPLPQMTTFDNSRAKVSEIDVNLEPAITETGPSRDQAPEDSPHPAPGTNDGFWEQFLTEQPGSNTHQEAQSERRDGDNKVDQARIGDRENLWWGKKNVEQMTEKLGHLTSAEKT

SEQ ID NO: 899 - DNA, 807 bp, Triticum aestivum
  misc_feature: Ceres CLONE ID no.634261
  misc_feature: Encodes the peptide sequence at SEQ ID NO 900
aaccaaacgcaatatcgccctgcccctccctcttcctcgtcgacgcgcaggccccagggaaattctccgttggagaaaagtcgcgtgccgtctctcgcccacagcccgttggcagcaatggcacaagagagctggaaggagtctgaggagactgtccaaacacctgaggcaccaatattgtgtgtaaacaactgcggcttcttcggtagcagcatgacaaacaacatgtgctccaagtgctacagggacttcattaaggccacgacaatggctgcccctgtagtggagaagaaggtgttctcagtggcatcatcttccagtgtgacattggagcaagcaaaggcagatgaagtaccagccgtggctgtagctgatagccaagcagcacaggagcctccaaagccgcccagcaacagatgcctttcatgccgcaagaagataggcttgaccggtttccagtgccggtgcgggggaacattctgctccatgcaccgctacgctgactcccacgaatgcactttcgactacaagaaggctggccgggagcagattgccaagcagaaccctgttgtgatagccaagaagatcaacaagatataattgataatgacaccgggttcatttgcttgctattcgtggtggtgctggattcgtctttacttgaatcagtaggtttcttctggtctggttgctagggtctcaattgtgtctatccttctccttcatggttcgcttctctccattaagaatgaaatgaaataatgtaaatatataatattatattgttttagctgttcgtttcgtatg

SEQ ID NO: 900 - protein, 160 aa, Triticum aestivum
  misc_feature: Ceres CLONE ID no.634261
  misc_feature: Bit score of 308.9 for HMM based on sequences of FIGURE 7.
  misc_feature (101)..(141): Pfam Name: zf-AN1 Pfam Description: AN1-like Zinc finger
  misc_feature (19)..(43): Pfam Name: zf-A20 Pfam Description: A20-like zinc finger
  misc_feature: Functional Homolog Of Ceres SEEDLINE ID no. ME04477 at SEQ ID NO. 742
MAQESWKESEETVQTPEAPILCVNNCGFFGSSMTNNMCSKCYRDFIKATTMAAPVVEKKVFSVASSSSVTLEQAKADEVPAVAVADSQAAQEPPKPPSNRCLSCRKKIGLTGFQCRCGGTFCSMHRYADSHECTFDYKKAGREQIAKQNPVVIAKKINKI

SEQ ID NO: 901 - protein, 389 aa, Vitis vinifera
  misc_feature: Public GI ID no. 157354692
  misc_feature (1)..(389): Bit score of 76.4 for hmm based on sequences of FIGURE 12.
  misc_feature (12)..(184): Pfam Name: HSF_DNA-bind Pfam Description: HSF-type DNA-binding
  misc_feature: Functional Homolog Of SEQ ID NO. 311
MDESPGSSNSPPPFLTKTYEMVDDPTTDSIVSWSQTNKSFIVWNPEDFSRDLLPRFFKHNNFSSFIRQLNTYGFRKIDSEQWAFANEDFIRGQPHLLRNIHRRKPVHSHSIQNQKGQGTSCPLSESDREGYRADIERLKHDKGALLLELQRHKEDRQGLELQMQHLKDRLQHMEQRQQTVISYLARMLQKPGLALSFLPSMETHNRKRRLLTSNCFYDESDVEENRIATSHTVNTEKLDATSVLELVEFLESSLSSWEDILDEFRPTSGTLIHPWSISYIQLNIDTRSKSTGIDMNCKPAATAPEVTTLKEQVVGAASPVPTGVNDVFWEQFFTENPDSSAEEVQLERKDDESRKNEGKHGDHGRFWWNARSANKLADQMGQLTPAERT

SEQ ID NO: 902 - protein, 185 aa, Picea sitchensis
  misc_feature: Public GI ID no. 116791212
  misc_feature (1)..(185): Bit score of 182.8 for hmm based on sequences of FIGURE 14.
  misc_feature: Functional Homolog Of SEQ ID NO. 2
MDTCPARKKSITLKYDIISSLAAAGIPSLNQKKLRRLPHVFCRVLELPFNSEVPVAVEENGECFRFVVSCDEALAFQEARAEIIEIAPGVIKVVIREASRRLRFSMDDLELDMWRFRLPSSTLPELSTAIYRDGELVVIVPKDVPTSDSEEEEDEGKGSLVEAREGDFSERNEESGMKSGNMVGC

SEQ ID NO: 903 - DNA, 684 bp, Glycine max
  misc_feature: Ceres Clone ID no. 707774
  misc_feature: Encodes the peptide sequence at SEQ ID NO. 904
aataaatccacaaattacaacaatatcacatttccctctctaaccatatttacaacatccaaacagggacttaaaattactagaattggagttattaagctatcacagcatgttcgcgaagaaacgctcccagcacggcggcgtcgtttcatcgatgccgagctcgaacgcgaagaagctattgagactgccgcacgtgttcgcgaaaatactagagcttccttttccctcagacgacgacgttttggtggaggaaacgccgcagttttttcgcttcgtggcgtcgtgcaacgccggtggtgtgcgagctctggccatcgagattcttccggggataacaaaaatcgtcatcaagagaatggacggtggtgacgtggcggtggcgggtcggcatcagcaggttccttcaggatttggtctgtggcggttccgccttccgccggggacgcagccggagatggtcaccgccgtgagcatcggcgggaagctggtggtgacggtgcccaagatcaagagcagagcaaactgattccatctccaactccaaccatacgtggaatataagagaggcgtgtgctttggaaagtagcgtttgtagataaacaatgtattgcatatcgcatatgtgatatgtggcctctttagatgttcgcttttttytccaataaamccmcgattacatcc

SEQ ID NO: 904 - protein, 139 aa, Glycine max
  misc_feature: Ceres Clone ID no. 707774
  misc_feature (1)..(139): Bit score of 101.2 for hmm based on sequences of FIGURE 14.
  misc_feature: Functional Homolog Of SEQ ID NO. 2
MFAKKRSQHGGVVSSMPSSNAKKLLRLPHVFAKILELPFPSDDDVLVEETPQFFRFVASCNAGGVRALAIEILPGITKIVIKRMDGGDVAVAGRHQQVPSGFGLWRFRLPPGTQPEMVTAVSIGGKLVVTVPKIKSRAN

SEQ ID NO: 905 - DNA, 438 bp, Solanum lycopersicum
  misc_feature: Ceres Annot ID no. 8461466
  misc_feature: Encodes the peptide sequence at SEQ ID NO. 906
atgaaggttcatccagtaacaagtaacgttttgtctccggctaacggctcagtttgccggaaaaagaagctccggagactacctcatatttttgccaaggttctagaacttccttttcattccgattctgatgtttcaatccacgaaacttctgattcgttgcgatttgtcatcccaacagatgatgtcggcgataatattagagctcacatagttgagatctatccgggtgttactaagattgttatccgagctgataacgtttttgattcttcattggacctcgacttgtggcgatttcggcttccggccacaactctgccggaactggctagtgcccgttttagtgacggtgaattggtggtcacggtgcccaaaggggaggaggaagacgacggcgatatcgtccgagcaggtggttttgttctcgtacaataa

SEQ ID NO: 906 - protein, 145 aa, Solanum lycopersicum
  misc_feature: Ceres Annot ID no. 8461466
  misc_feature (1)..(145): Bit score of 211.7 for hmm based on sequences of FIGURE 14.
  misc_feature: Functional Homolog Of SEQ ID NO. 2
MKVHPVTSNVLSPANGSVCRKKKLRRLPHIFAKVLELPFHSDSDVSIHETSDSLRFVIPTDDVGDNIRAHIVEIYPGVTKIVIRADNVFDSSLDLDLWRFRLPATTLPELASARFSDGELVVTVPKGEEEDDGDIVRAGGFVLVQ

SEQ ID NO: 907 - DNA, 803 bp, Zea mays
  misc_feature: Ceres Clone ID no. 260703
  misc_feature: Encodes the peptide sequence at SEQ ID NO. 908
  misc_feature (200)..(200): n is a, c, t, g, unknown, or other
aaatcatcacaggtccaaagcgcttccgattctctcttctcccctccgcccgcctccggttgtcttctccaattccccaacgcagccagcagcgcaaggtccagaagcccaggaccagacgacggacctccgcgccccatcgatccgcgcggccctcccccaacgcgcgtgcgtccgcaactagcgtctgcygccggtynctttcttccgcaccccccgacgcggcaaggagcccccccgccatgagggtccacccggccccgcggaagcgcaccatckyygtgcaacgctgcgcctccgcggcggcgggcgcgctcggcgggaagaagctgcgccgcctgccgcacatattcgacaaggtgctggagctcccgttcgcggccgacgcggacgtgtccgtcgaggaggacgcggcggcgctgcggttcgtcgccgccgccgacgagttctccctcgcgggcgcccgcgcgcacgccgtcgagatccacccaggggtcaccaaggtcgtcgtccgcggcctctcctcctcctccctcggcggcgatggcgacgacgacgacgacggggccgccgccgccgycttcgagctcgaccgctggcgcttccgcctcccgccctgcacgcgccccgccatggccaccgccacctacgccgcgggcgagctcgttgtcaccgtccccaagggcgccggccccggcgacggcggcgcggccgctgtcctcggtggcacggagcgcgtccttgtgcttgtatagtatagtaaatctagcttttccctaaattatatatcatctgctttgtgc

SEQ ID NO: 908 - protein, 170 aa, Zea mays
  misc_feature: Ceres Clone ID no. 260703
  misc_feature (1)..(170): Bit score of 313.2 for hmm based on sequences of FIGURE 14.
  misc_feature: Functional Homolog Of SEQ ID NO. 2
  misc_feature (13)..(13): Xaa is any aa, unknown, or other
  misc_feature (113)..(113): Xaa is any aa, unknown, or other
MRVHPAPRKRTIXVQRCASAAAGALGGKKLRRLPHIFDKVLELPFAADADVSVEEDAAALRFVAAADEFSLAGARAHAVEIHPGVTKVVVRGLSSSSLGGDGDDDDDGAAAAXFELDRWRFRLPPCTRPAMATATYAAGELVVTVPKGAGPGDGGAAAVLGGTERVLVLV

SEQ ID NO: 909 - DNA, 736 bp, Zea mays
  misc_feature: Ceres Clone ID no. 340990
  misc_feature: Encodes the peptide sequence at SEQ ID NO. 910
aaggtccagaagcccagaaccagacgagcacggacggatctcccccaacgcgcgtgcgtccgcaactagcgtctgccgccggccgccttcttccgcaccccccgacgcggcaaggagccccccgccatgagggtccacccggccccgcggaagcgcaccatcgccgtgcaacgctgcgcctccgcggcggcgggcgcgctcggcgggaagaagctgcgccgcctgccgcacatattcgacaaggtgctggagctcccgttcgcggccgacgcggacgtgtccgtcgaggaggacgcggcggcgctgcggttcgtcgccgccgccgacgagttctccctcgcgggcgcccgcgcgcacgccgtcgagatccacccaggggtcaccaaggtcgtcgtccgcggcctctcctcctcctccctcggcggcgatggcgacgacgacgacgacggggccgccgccgccgccttcgagctcgaccgctggcgcttccgcctcccgccctgcacgcgccccgccatggccaccgccacctacgccgcgggcgagctcgttgtcaccgtccccaagggcgccggcgccggcgacggcggcgcggccgctgtcctcggtggcacggagcgcgtccttgtgcttgtatagtaaatttagcttttccctaaatttatatatatatcatctggtttgtgcactccgtcactggtttctccctaaattaatttctgctaatcctctgtcg

SEQ ID NO: 910 - protein, 170 aa, Zea mays
  misc_feature: Ceres Clone ID no. 340990
  misc_feature (1)..(170): Bit score of 314.1 for hmm based on sequences of FIGURE 14.
  misc_feature: Functional Homolog Of SEQ ID NO. 2
MRVHPAPRKRTIAVQRCASAAAGALGGKKLRRLPHIFDKVLELPFAADADVSVEEDAAALRFVAAADEFSLAGARAHAVEIHPGVTKVVVRGLSSSSLGGDGDDDDDGAAAAAFELDRWRFRLPPCTRPAMATATYAAGELVVTVPKGAGAGDGGAAAVLGGTERVLVLV

SEQ ID NO: 911 - DNA, 870 bp, Zea mays
  misc_feature: Ceres CLONE ID no.1387149
  misc_feature: Encodes the peptide sequence at SEQ ID NO 912
aaaaacaggttaacaacaacacatacacatctctctctctctctcttcttcgttttatatttccattctttttcttcatttccgccatttctgttttattttggttgccgagaaaacgcaggaactcggtgacctaattatagtctcgtcgattgtctttttcagaattttcgacgaattttattgattaataattaattaatggcggaagaacatccatgtcagacgccggaaggccaccgtctctgcgttaacaactgcggtttcttcggaagctcagccaccatgaatctctgctccaactgctacggcgacctctgcctcaagaaccagcagcaagcttccatgaaatcaaccgtcgagtcctccctctccgccgcatctcctccgtcgtcaccggagatccagtcaatctccacgtcgacgatcgcgcccgtcgtccaaatttacgcggcggagatacagatagagaaacaaatccagcagcaacggcctaatcggtgcaccgtgtgcaggaaacgggtcgggttaaccgggttcatgtgccggtgcgggacgactttctgcgggacccacaggtatccggaggttcacggatgcacgttcgatttcaaatcggctgggcgcgaggagatcgcgaaggctaacccgttggttgtagccgcgaagctccagaagatatgatctgagccgttgcttgcgttgttcaccgtgaaacatacttttatgttacggacatgtgtttacgtaattaatggttgagacagttttcattcaccttttaattattttccttttcttccggaagaattttaaagttttataattgtgtggctttgtgcttgtaaaaaaaaagattttcttttgcgg

SEQ ID NO: 912 - protein, 160 aa, Zea mays
  misc_feature: Ceres CLONE ID no.1387149
  misc_feature: Bit score of 378.8 for HMM based on sequences of FIGURE 7.
  misc_feature (101)..(141): Pfam Name: zf-AN1 Pfam Description: AN1-like Zinc finger
  misc_feature (13)..(37): Pfam Name: zf-A20 Pfam Description: A20-like zinc finger
  misc_feature: Functional Homolog Of Ceres SEEDLINE ID no. ME04477 at SEQ ID NO. 742
MAEEHPCQTPEGHRLCVNNCGFFGSSATMNLCSNCYGDLCLKNQQQASMKSTVESSLSAASPPSSPEIQSISTSTIAPVVQIYAAEIQIEKQIQQQRPNRCTVCRKRVGLTGFMCRCGTTFCGTHRYPEVHGCTFDFKSAGREEIAKANPLVVAAKLQKI

SEQ ID NO: 913 - protein, 168 aa, Vitis vinifera
  misc_feature: Public GI ID no. 157336501
  misc_feature (1)..(168): Bit score of 328.3 for hmm based on sequences of FIGURE 14.
  misc_feature: Functional Homolog Of SEQ ID NO. 2
MKVHPVQKKRNITFRYEINSNLSDPLRDRLMGSTQKKLRRLPHIFSRVLELPFKSDADVAVEESSDCFRFVAVTDGIGDIRAHTVEIHPGVTKIVIRGSDVVELTMDELELDMWRFRLPATTRPELASAVYVDGELVVTVPKCVGMEGAGGGGGELRGGVGGRLVVVL

SEQ ID NO: 914 - protein, 166 aa, Vitis vinifera
  misc_feature: Public GI ID no. 157347959
  misc_feature (1)..(166): Bit score of 242.2 for hmm based on sequences of FIGURE 14.
  misc_feature: Functional Homolog Of SEQ ID NO. 2
MKANPTPKKRSISLQYDIVSTLSEANRLVSSQKKLRRLPHIFTRVLELPFRSDADVSVTETPDHLRFAVTTDDVGDDVRTQTIQLHPGVTKVVIRGRNFLDLSLDGLGVELDLDLWRFRLPASTLPEMASAAYSDGELVVTVPKCGADDDEEGVWSAGTRPLVLVQ

SEQ ID NO: 915 - protein, 157 aa, Zea mays; identical to SEQ ID NO: 60
  misc_feature: Ceres CLONE ID no.1218065
  misc_feature (64)..(123): Pfam Name: DnaJ Pfam Description: DnaJ domain
  misc_feature: Bit score of 386.5 for HMM based on sequences of FIGURE 10.
  misc_feature: Functional Homolog Of Ceres CLONE ID no. 31309 at SEQ ID NO. 60

SEQ ID NO: 916 - protein, 358 aa, Triticum aestivum
  misc_feature: Ceres CLONE ID no.677797
  misc_feature: Bit score of 555.1 for HMM based on sequences of FIGURE 9.
  misc_feature (107)..(340): Pfam Name: Trehalose_PPase Pfam Description: Trehalose-phosphatase
  misc_feature: Functional Homolog Of Ceres SEEDLINE ID no. ME20095 at SEQ ID NO. 1129
MTNHAAFAAEDAVTAVAAPVQPGRHFASFPPRRARDCRKAALGRMDLATSGVLMAGSLLDSMKASSPRHAMPPAGADHEEWIEKHPSALEWFEGVLAATEGKQIVMFLDYDGTLSPIVQDPDRAVMTEEMRDAVRGVAQHFPTAIVSGRCRDKVFNFVKLEELYYAGSHGMDIKGPTKVSNHKAKADEVLCQPATEFLPVIQEVYEKLTAKMESIPGAMVENNKFCLSVHFRCVEEAEWDALGREVKAVLDDYPKLCLTKGRKVLEIRPSIEWNKGHALKFLLKSLGYAGRSDVFPIYIGDDRTDEDAFKVLRNMGQGIGILVTKFPKDTSASYSLREPAEVKEFLRKLVKSNATKKG

SEQ ID NO: 917 - DNA, 944 bp, Zea mays
  misc_feature: Ceres CLONE ID no.1423851
  misc_feature: Encodes the peptide sequence at SEQ ID NO 918
agagaactttattctctcctctaacctctcaacttctgctggatctctccagcagacggaagatcttcttcggagagattcttaggggaccgaacgatctatcgatcaaggcttctcgggcaaacagaaatggaccacgacaagacaggatgccaaagcccacccgagggtcccaagctatgcatcaacaactgcggtttcttcggaagcgctgccacaatgaacatgtgttccaagtgccacaagactatcttgtttcaacaggaacagggggccaagcttgcatctgcagtgtctggatcacccagcaacatcctaaaggaaaccttcactgctgatttggttgatgctggaaccaaatccatcgagcctgtggctgtctctgtacaagctgttgcagaggtagtagcaccagaagaagctgcagcaaaaccaaaggaagggcccagccgatgtactacttgcaacaaacgggttggtttgactggattcaaatgtcgatgtggtgacctcttctgtggtacgcaccgctatgcagacgttcataactgctctttcgattaccatgttgctgcgcaagaagctatagccaaagcgaacccggttgtgaaggcagataagcttgacaagatctgaaactcagaaactatgtttccttcttcatgtccgtgtctggttcaagcgtgtgttgatctttagcttcttccgttctctctgccagtatctgtggtgtgaaaactttctatattatcttgtgtttgcaagcagagaagtgtgctcttaaatatatatatatgctttgatgtgtttctctttttttttttttaatattatttatgagcactatggtttggttatgtttactcctttgggtctgtatcatattgagattgtaactttagctatatgaagatttttcttaaaagctaaaaaaaaaaaaaaaa

SEQ ID NO: 918 - protein, 168 aa, Zea mays
  misc_feature: Ceres CLONE ID no.1423851
  misc_feature: Bit score of 266.5 for HMM based on sequences of FIGURE 7.
  misc_feature (109)..(149): Pfam Name: zf-AN1 Pfam Description: AN1-like Zinc finger
  misc_feature (15)..(39): Pfam Name: zf-A20 Pfam Description: A20-like zinc finger
  misc_feature: Functional Homolog Of Ceres SEEDLINE ID no. ME04477 at SEQ ID NO. 742
MDHDKTGCQSPPEGPKLCINNCGFFGSAATMNMCSKCHKTILFQQEQGAKLASAVSGSPSNILKETFTADLVDAGTKSIEPVAVSVQAVAEVVAPEEAAAKPKEGPSRCTTCNKRVGLTGFKCRCGDLFCGTHRYADVHNCSFDYHVAAQEAIAKANPVVKADKLDKI

SEQ ID NO: 919 - DNA, 835 bp, Panicum virgatum
  misc_feature: Ceres Clone ID no. 1955889
  misc_feature: Encodes the peptide sequence at SEQ ID NO. 920
agcgagagcagaggagacaccacgaaaggaacccgagagagggggaaaaaaaacttcggttttggagctcttggcttgttgcgagcacatgaggatccacccagcagcagcagctcccgccggcggcaagaaggacctccgccggcttccgcacgtgtacagcaaggtgctcgagctgctgctcccggcggacaccgacgtcgaggtgttcgaaggccccgacgccttccacttcgtcgccgccggtgcgcgaggcgccggcgtggtgcaggtgcgcaccgtgaggatccaccccggggttaccaaggtagtggtgcaggcaggtggcgccggaggcgctgaggaggctggcgccgacgacatggagctcgacaggtggcggtcccggctgcccgaggcgagtcgtccggcgatggcggtggctgggtacgtcgacgggcagctcgttgtgacagttccaaaggggcgtgaaggcagcgaaggcgccgatgccgggcaaggtgaggttacctggagatgctgcagcggaggaaagattagtggaagactggtggttgtacagtagtagtagagaatatatagtgcgttggtcgtcatctaatcaaaatctagtactatgtagtaatgtcttgccatctttgttttttttcctgaagatgggctgtttattatgttacttccctggcctggttttagcatcagagatgtttcatgagcgataccttccggctggttcttaagcgtatagaaacagctattgtaaattctctttgatttccttgaaatcaaatgtaaattctagatggaccaaagactcttgagatagccttatcct

SEQ ID NO: 920 - protein, 158 aa, Panicum virgatum
  misc_feature: Ceres Clone ID no. 1955889
  misc_feature (1)..(158): Bit score of 339.1 for hmm based on sequences of FIGURE 14.
  misc_feature: Functional Homolog Of SEQ ID NO. 2
MRIHPAAAAPAGGKKDLRRLPHVYSKVLELLLPADTDVEVFEGPDAFHFVAAGARGAGVVQVRTVRIHPGVTKVVVQAGGAGGAEEAGADDMELDRWRSRLPEASRPAMAVAGYVDGQLVVTVPKGREGSEGADAGQGEVTWRCCSGGKISGRLVVVQ

SEQ ID NO: 921 - DNA, 975 bp, Sorghum bicolor
  misc_feature: Ceres Annot ID no. 8632003
  misc_feature: Encodes the peptide sequence at SEQ ID NO. 922
atgtgccacatgcgccagctccacccagattctgacaacgccttcccaacccgcatcgacagcgcgcacttggattcggcgacgccggagcgcggaggaggcaagcgccgatccagagacgatggccgccgcgggctcctcgccgtcatcctcctcaagcaagcgcccaggttggaagggaaggtggccctcgtcaccggtggcgccaccggcatcggcgaagccatcgttcgcctcttcacggagcacggcgccaaggtctgcatcgcggacatccaggacgaggccgggcagcagctgcgcgacgccctgggaggcgacgcgcagggcgtcatgttcgtccactgcgacgtgacgtcggaggaggacgtgagccgcgccgtggacgcggcggcggagcggttcggcgcgctggacgtgatggtgaacaacgcgggcgtgacgggtgccaaggtgacggacatccgtgccgtggacttcgccgaggtgcgccgggtgctcgacatcaacgtgcacggcgtgttcctggggatgaagcacgcggcgcgcgtcatgatcccgcagaagcggggctccatcgtgtcgctggccagcgtggccagcgccatcggcgggctgggcccgcacgcgtacacggcgtccaagcacgccgtggtcgggctcaccaagagcgtcgccgcggagctcggccgccacggggtgcgcgtcaactgcgtgtccccctacgccgtgcccacggcgctgtccatgccgcacctgccccagggcgcgcgcgccgacgacgcgctcacggacttcctggccttcgtcggcggcgaggccaacctcaagggcgtcgacgccatgcccaaggacgtcgcccaggcggtgctatacctggccagcgacgaggcgaggtacgtcagcgcgctcaacctcatggtggacggcggcttcacagccgtcaaccataacctcaggccattcgatgattag

SEQ ID NO: 922 - protein, 324 aa, Sorghum bicolor
  misc_feature: Ceres Annot ID no. 8632003
  misc_feature (1)..(324): Bit score of 677.2 for hmm based on sequences of FIGURE 8.
  misc_feature (61)..(230): Pfam Name: adh_short Pfam Description: short chain dehydrogenase
  misc_feature: Functional Homolog Of SEQ ID NO. 1012
MCHMRQLHPDSDNAFPTRIDSAHLDSATPERGGGKRRSRDDGRRGLLAVILLKQAPRLEGKVALVTGGATGIGEAIVRLFTEHGAKVCIADIQDEAGQQLRDALGGDAQGVMFVHCDVTSEEDVSRAVDAAAERFGALDVMVNNAGVTGAKVTDIRAVDFAEVRRVLDINVHGVFLGMKHAARVMIPQKRGSIVSLASVASAIGGLGPHAYTASKHAVVGLTKSVAAELGRHGVRVNCVSPYAVPTALSMPHLPQGARADDALTDFLAFVGGEANLKGVDAMPKDVAQAVLYLASDEARYVSALNLMVDGGFTAVNHNLRPFDD

SEQ ID NO: 923 - DNA, 831 bp, Solanum lycopersicum
  misc_feature: Ceres Annot ID no. 8455086
  misc_feature: Encodes the peptide sequence at SEQ ID NO. 924
atggcttctgcttcattcctttcaacaatcggcaaaaggctagaggggaaagtagcaattgtaaccggaggagctagtggtatcggtgaagcaattgcaaagctcttctttgaacatggagccaaagtggtcattgctgatgtccaagatgaactcggcaactcggtcatcaacgcccttggcggctcatccaactccatttacatccactgtgacgtcacaaacgaagactacgtccaagaagctgtcgacagaaccatcgccacatttggaaaactcgacatcatgatctgcaatgctggcatatgcgacgagaccaagccaagaatcatcgacaatacaaaagcagattttgaacgagtccttagcatcaatataacaggagttttcttgagcatgaagcatgccgctcgagtcatggtcccgacacgtagcggctgcatcatatccaccgctagtgtaagctccaaggttggagctgcagcatcacatgcttactgcagctccaaacacgccgtgttgggtcttaccaagaacctagcggtggaactaggacaattcggtatacgtgtgaattgcttgtcaccatacgcgatggtcacgccaatggcgacaaagatcattggacttgaaaatgaagagcttgagaacgcgatgagcacgattgggaaccttaaaggtgctactctgaaggtggatgatgttgcaaaagcagcattgttcttagcaagtgatgatgcccagtatatcagtgggcacaatctattcattgatgggggattcactgtgtctaatccaggactaggcatgttcaagtatccagaatcttga

SEQ ID NO: 924 - protein, 276 aa, Solanum lycopersicum
  misc_feature: Ceres Annot ID no. 8455086
  misc_feature (1)..(276): Bit score of 645.5 for hmm based on sequences of FIGURE 8.
  misc_feature (17)..(185): Pfam Name: adh_short Pfam Description: short chain dehydrogenase
  misc_feature: Functional Homolog Of SEQ ID NO. 1012
MASASFLSTIGKRLEGKVAIVTGGASGIGEAIAKLFFEHGAKVVIADVQDELGNSVINALGGSSNSIYIHCDVTNEDYVQEAVDRTIATFGKLDIMICNAGICDETKPRIIDNTKADFERVLSINITGVFLSMKHAARVMVPTRSGCIISTASVSSKVGAAASHAYCSSKHAVLGLTKNLAVELGQFGIRVNCLSPYAMVTPMATKIIGLENEELENAMSTIGNLKGATLKVDDVAKAALFLASDDAQYISGHNLFIDGGFTVSNPGLGMFKYPES

SEQ ID NO: 925 - DNA, 1762 bp, Gossypium hirsutum
  misc_feature: Ceres CLONE ID no.1927040
  misc_feature: Encodes the peptide sequence at SEQ ID NO 926
aaaaaactctctttgattttatacaatctttgggcttcgtttttaatctcttattctctttcgtttctctgttgcatttccacaaatatctccgtgcttccccttttcgttgttttttcccttttctctttacaactgcattttttaaagatcagatcttttccgggtttcacctcatcaatcagatttaagcacattttgatcttgtttcgaatccctgctgttatcgatatcgagaaaagttcaatttttgtcataaattcggtgtagctttggagatgagaagttttcaggtaagctgcgattgatggactgtttatcgccgagaagcagtgataagaagacattgaagaggtggtttttcatagataaaagggttggctaaataagtgtacttcgaaaaaaaaggtgatttgaagctaatggattctaagtctaatcattcatctcctgttcttaccgatccgattccgataaacaagtcaaggttaggcattcattcaaatctactttcatatccacaatctggtggatctttgtcccctggtaagtataagatgactcctaggaagaaacctgcaaaactcgatgatgttcggtctaatggttggttggatgctatgaaatcttcgtctcccccttgtaagaagttgatcaaggggttcaatattgaggttcccgctgatgatatcgatattgcttatcattcctggatgattaaatatccatctgcacttaaatcttttgaggaaatctcgagacatgccaagaacaagaagatagctgttttcctagattatgatggtactctttctcctatcgtagatgatccagatcgagcttttatgtctgatgctatgcgttctgctgtgagaaacgtcgcgaagtattttccgacagctattattagtggcagaagtcgtgataaggtttatgaattggtaggactaactgaacttttttatgctggtagtcatgggatggacattatgggccctgtgaaacatacagagtctgatgatggccatccaaaccgtgttagatcaattgaccaagagggcaaggaggtaaaccttttccagcctgctagagaattcatacctatgattgacgaggtttttagaacccttgtcgagaacactaaagatattaagggtgcaaaggttgagaatcacaagttttgcacctcagtacattaccgtaacgtagaagaaaagaactggcctattattgcgcaatgcgttcatgatattctgaaagactatcctcgtttgcgattaacgcatggacggaaggttttagaggtccgtcctgtgattgactggaataaagggaaggcggttgaatttctgcttgaatctcttgggctaagtgatagagatgatgtgctcccaatctatattggagatgacaaaactgatgaggatgcgtttaaggtcttaaaggaaggaaatatgggttatggaatcttggtatcttcagtgcctaaagaaagcaatgcaattttctctgtcagggacccatcagaggtgaagaaatttctgaaggcactggtgagatggaagaggcttgaagaagcttgaaggaaaagcaaggctttgggagcaaaaaaaaggcagaataaaattttcattgaagaggataatttagtttttatttttatattttgcaaataatgtaattttttccatttcaatttttatcaacgattatcccccaatgaaaccagtcatttttattacaaaaaaaaaaaaaaaaaaaa

SEQ ID NO: 926 - protein, 386 aa, Gossypium hirsutum
  misc_feature: Ceres CLONE ID no.1927040
  misc_feature: Bit score of 960.7 for HMM based on sequences of FIGURE 9.
  misc_feature (123)..(368): Pfam Name: Trehalose_PPase Pfam Description: Trehalose-phosphatase
  misc_feature: Functional Homolog Of Ceres SEEDLINE ID no. ME20095 at SEQ ID NO. 1129
MDSKSNHSSPVLTDPIPINKSRLGIHSNLLSYPQSGGSLSPGKYKMTPRKKPAKLDDVRSNGWLDAMKSSSPPCKKLIKGFNIEVPADDIDIAYHSWMIKYPSALKSFEEISRHAKNKKIAVFLDYDGTLSPIVDDPDRAFMSDAMRSAVRNVAKYFPTAIISGRSRDKVYELVGLTELFYAGSHGMDIMGPVKHTESDDGHPNRVRSIDQEGKEVNLFQPAREFIPMIDEVFRTLVENTKDIKGAKVENHKFCTSVHYRNVEEKNWPIIAQCVHDILKDYPRLRLTHGRKVLEVRPVIDWNKGKAVEFLLESLGLSDRDDVLPIYIGDDKTDEDAFKVLKEGNMGYGILVSSVPKESNAIFSVRDPSEVKKFLKALVRWKRLEEA

SEQ ID NO: 927 - DNA, 1338 bp, Populus balsamifera subsp. trichocarpa
  misc_feature: Ceres ANNOT ID no.1469023
  misc_feature: Encodes the peptide sequence at SEQ ID NO 861
atggacctcaaatcaaatcataatgctcctgtgctcactgattctgctcccctaagcaagtcaaggctacgcgggtaccaccatggtttgatgctgccgtactcaccctcaggtgcacctttctcgtcaaatctattactatctattcctaggaggaaaactggagtgcttgatgatgttcgctcctgtggttggctggatgccatgaaatcatcatctcctactcataagaagtttgccaaggatattaaccatgagctttccgcacctgatccagaagttgcctatcgcacctggctgcttaaatatccatctgcgcttgcatctttcgagcaaattgcaaactttgcaaaaggcaagagaatcgccttatttctggattatgatggtactctttcaccaattgttgaaaatcctgacaatgccttcatgtctgctgatatgcgttccattgtaaaggaagtggcaaaatatttcccaacagcaataatcagtggaagaagccgtgacaaggtgtatgagtttgtagggcttacagaactctactatgcgggtagtcatggtatggatatcatgggccctgtcaggcaatctgtatctgacgaccaccgaaattgtatcaagtctacggacaagcagggcaacgaagttaacttattccagcctgcaagagaatttttacctatgattgacgaggtttatagttcccttgtcaggattaccgaagatattaaaggggcaacagttgagaacaataaattctgtgtctctgtacattaccgtaacgttgatcaagataactggaaatcagttggggagcgtgtccaggatgtcataaagaagtatcctcgcctgcgattgactcatgggaggaaggttttagaaatccgtcccgcgatcaattgggacaaggggaaagctcttgaatttctacttgaatcactagatctcagcaattgtgatgatgtgctgccgatttatgttggagatgaccggacagatgaagatgcatttaaggttttgagagagaggaactgtggttatggcatttttgtatcaaaatcaccgaaggaaagcaatgcgtattactctctcagagacccagcagagcttgagaattcctgtctcaggtggactggatatcctaaaccagaaaaacgttgggagtccaaaatatttgttgtctacgatgatgtttgtgttaatcgggataagcctcttagattggattgttgtcaaaaccctagctatgtggccagaacctcgttggccggtgtaagatgcacagcacttcaggtcaggggtcctagggctgtggaagtggtaatattgacctga

SEQ ID NO: 928 - DNA, 1116 bp, Sorghum bicolor
  misc_feature: Ceres Annot ID no. 8712513
  misc_feature: Encodes the peptide sequence at SEQ ID NO. 929
atgttcagcagagccttgcaggtgattctcagggagaagaagagcaggacgattggtccagccttggtccatgccttcaactcggcttccagctctcaaactcagaggctggctggaaaggtcgccgtcatcaccgggggcgcgagcggcatcggcaaggcgaccgcagccgagttcgtgagaaacggggcgagggtcgtcatcgccgacatccaggacgacctcggccgtgccgttgccgccgagctcggacccgacaacgcgtgctgctacacccactgcgacgtcgccgacgaggcgcaggtcgccgccgccgtggacctcgcagtggcccgccacggccagctcgacgtcatgttcaacaacgccggcatcacgggctcccccgggtgcgggtggccaccgctcggcgccgtggacctcgccgacttcgaccgcgtcatggccgtcaacgcccgcggagtgctggcggggctcaagcacgccgcgcgcgtcatggtgccgcgccgccgcggcagcatcatctgcaccgccagcgtcgccggcctgtgcggcggcatggttgccgtcgcgtacagcgcctccaaggcgacggtgatcggcctggtgcgcgctgtggcggcggagatggcgtcctccggggtgcgcgtcaacgccatctctccctacgccgtcccgacgcctctggcgctggcagcggtcgcctcgaggcaatcgatgaggggattgagcgccgaggagattaagcggagggtggagatagactcgaacgtgatgtacgggacgaagttggaggaggacgacatcgcgagggcggcactctacctggcgtccgacgacgctaagtatgtcaacggccacaacctcgtcgtcgacggcggcttcacggtgagcagagaagtaccaaaaatcctggcacaagcacgcccaaggagtgatgaacggtccgcatggattttacttcgtggcgctgctgacttgctgtacaccagaatccgtgatggtctctcacgaccagcaaataaagcccggacgccactaggttattgccaacatgggatgggcgacggggccacggtcgtcttagcagcggcagttagcctttcagttggataa

SEQ ID NO: 929 - protein, 371 aa, Sorghum bicolor
  misc_feature: Ceres Annot ID no. 8712513
  misc_feature (1)..(371): Bit score of 369.9 for hmm based on sequences of FIGURE 8.
  misc_feature (40)..(211): Pfam Name: adh_short Pfam Description: short chain dehydrogenase
  misc_feature: Functional Homolog Of SEQ ID NO. 1012
MFSRALQVILREKKSRTIGPALVHAFNSASSSQTQRLAGKVAVITGGASGIGKATAAEFVRNGARVVIADIQDDLGRAVAAELGPDNACCYTHCDVADEAQVAAAVDLAVARHGQLDVMFNNAGITGSPGCGWPPLGAVDLADFDRVMAVNARGVLAGLKHAARVMVPRRRGSIICTASVAGLCGGMVAVAYSASKATVIGLVRAVAAEMASSGVRVNAISPYAVPTPLALAAVASRQSMRGLSAEEIKRRVEIDSNVMYGTKLEEDDIARAALYLASDDAKYVNGHNLVVDGGFTVSREVPKILAQARPRSDERSAWILLRGAADLLYTRIRDGLSRPANKARTPLGYCQHGMGDGATVVLAAAVSLSVG

SEQ ID NO: 930 - DNA, 912 bp, Sorghum bicolor
  misc_feature: Ceres Annot ID no. 8657183
  misc_feature: Encodes the peptide sequence at SEQ ID NO. 931
atgggtcgtgatccctgttttacttgctgctgcctgctgcattatgcacatcggagacgctgcaccttaccttggttggtcgaattggtctgtgtgtacgccaggttagctggaaaggtagcggtgatcaccggcggcgcgagcgggatcgggaaggcgacggcagctgagtttgtcaggaacggggcgagggtcatcatcgccgacgtccaggacgacctcggacacgccgtagctaccgagctgggcgccgacgccgtgcgatacacccgctgcgacgtcacggacgaggcgcaggtcgccgcggccgtcgacctcgccgtccagctccacggccgcctcgacgtgatgtacaacaacgcgggcatcggcggcgacatggcggcgtcctcgctgggcgccatcgacctggccgacttcgaccgcgtcatggccgtcaacgcccggggcgtgctggccggcgtgaagcacgccgcgcgcgtcatggtgccgcgccgcaccggcagcatcatctgcaccgccagcaccaccgctgtgctgggcgacatggcccctacgccctactgcgtctccaaggtggcggtcgttggaatcgtgcgcgccgtggccggacagatggcgcgctccggggtgcgcgtcaacgccatctccccgcacgctatcccgacgccgctggcgatggctactatggcgcagtggttccccgataggagcgtcgaggagcatcggcggatcctcgagagggacatgaacgagatggccgggcctgtgctggaggcggaggacattgccagggcggcggtttacctggcgtccgacgaggccaagtacgtgaacggacagaatctggtcgtcgacggcgggtacacggtgagcaaagcgctgaacatgccagcccctgcagcacgctga

SEQ ID NO: 931 - protein, 303 aa, Sorghum bicolor
  misc_feature: Ceres Annot ID no. 8657183
  misc_feature (1)..(303): Bit score of 340.9 for hmm based on sequences of FIGURE 8.
  misc_feature (39)..(207): Pfam Name: adh_short Pfam Description: short chain dehydrogenase
  misc_feature: Functional Homolog Of SEQ ID NO. 1012
MGRDPCFTCCCLLHYAHRRRCTLPWLVELVCVYARLAGKVAVITGGASGIGKATAAEFVRNGARVIIADVQDDLGHAVATELGADAVRYTRCDVTDEAQVAAAVDLAVQLHGRLDVMYNNAGIGGDMAASSLGAIDLADFDRVMAVNARGVLAGVKHAARVMVPRRTGSIICTASTTAVLGDMAPTPYCVSKVAVVGIVRAVAGQMARSGVRVNAISPHAIPTPLAMATMAQWFPDRSVEEHRRILERDMNEMAGPVLEAEDIARAAVYLASDEAKYVNGQNLVVDGGYTVSKALNMPAPAAR

SEQ ID NO: 932 - protein, 372 aa, Arabidopsis thaliana
  misc_feature: Public GI ID no.7960729
  misc_feature: Bit score of 702.9 for HMM based on sequences of FIGURE 9.
  misc_feature (116)..(350): Pfam Name: Trehalose_PPase Pfam Description: Trehalose-phosphatase
  misc_feature: Functional Homolog Of Ceres SEEDLINE ID no. ME20095 at SEQ ID NO. 1129
MSASQNIVVSETTMSSIIPNNNNNNNNSSSQKLPPCLISISKKKLLKNIDIINGGGQRINAWVDSMRASSPTHLKSLPSSISTQQQLNSWIMQHPSALEKFEQIMEASRGKQIVMFLDYDGTLSPIVDDPDKAFMSSKMRRTVKKLAKCFPTAIVTGRCIDKVYNFVKLAELYYAGSHGMDIKGPAKGFSRHKRVKQSLLYQPANDYLPMIDEVYRQLLEKTKSTPGAKVENHKFCASVHFRCVDEKKWSELVLQVRSVLKKFPTLQLTQGRKVFEIRPMIEWDKGKALEFLLESLGFGNTNNVFPVYIGDDRTDEDAFKMLRDRGEGFGILVSKFPKDTDASYSLQDPSEASDGFLTTIGGMETNAAKNVK

SEQ ID NO: 933 - protein, 371 aa, Brassica rapa
  misc_feature: Public GI ID no.72255610
  misc_feature: Bit score of 760.8 for HMM based on sequences of FIGURE 9.
  misc_feature (111)..(345): Pfam Name: Trehalose_PPase Pfam Description: Trehalose-phosphatase
  misc_feature: Functional Homolog Of Ceres SEEDLINE ID no. ME20095 at SEQ ID NO. 1129
MEKPNRMSESQNVVVSEAARSIIPNNSSAPPGFISISKKKLLKNLEIINDGERINAWVDSMRASSPTHPKSLPSSISSEQQLSSWIMQHPSALEMFEKITEASGGKQIVIFLDYDGTLSPIVDDPDRAFMSSKMRRTVKKLAKCFPTAIVTGRCLDKVYNFVKLAELYYAGSHGMDIKGPAKGFSRHKRVKQSLLYQPASDYLPMIDEVYRQLLEKTKSTPGVIVENNKFCASVHFRCVDEKKWSELVLQVRSVLNEYPRLKLNQGRKVFEIRPMIEWDKGKALEFLLESLGFGNSNNVFPVYIGDDRTDEDAFKLLRDRGEGCGVLVSKFPKDTDASYYLQDPSEASDEFLATIGGVETNAAKSVKRMYV

SEQ ID NO: 934 - DNA, 1154 bp, Glycine max
  misc_feature: Ceres Clone ID no. 557012
  misc_feature: Encodes the peptide sequence at SEQ ID NO. 935
atcttcgaagttcaaagtgtaggacgagaaagtagacacagccatgtccactactggtactgttctggcttccactccaacacaaaggctattaggcaaagtggcattggttactggtggagcgtctggaattggagaaagcattgtgcgcctcttccatatccatggtgctaaaatatgtatagctgatgtgcaagacaaccttggaaagcaggtctgtcagtctcttggtgatgaagcaaatgttgtttttgtccattgtgatgttacagtagaggatgatgtttcccatgcagtggacttcactgtgggtaaatttggcacccttcacatcatagtcaacaatgccggaatttctggatcaccttgttccgatatccgcaatgcagacttatcagaattcgataaggtgtttagtgtaaatacgaagggagtgttccacgggatgaaacacgctgctcgaattatgatcccgaagaagaagggctcaatcatttctttatgcagtgtagcaagtgccataggtggcttaggaccgcatgcatacacagggtccaagtatgctgtattggggctcacaaagaatgttgcagctgaattggggaaacatgctataagagtgaactgtgtgtcaccttatggtgttgcaacaggtttggccttggctcatttgcctgaggatgagagaactgatgatgccttggtcagttttcgtgattttactgggagaatggccaacttgcagggggtagaattaactactcacgatgtggctaatgctgtgctcttccttgcaagtgatgatgctaaatatataagtggagagaatctcatggttgatggaggcttcacaagtgcaaatcactcactccaagtttttagatgattaatggtatttcattgtttgttagtttacataatttgaggcattgcaatcctgatgtctagtacaagggttttcagttaacatacaaaacaaaatgaaaatgctcctctaaagtagtcttttttaatttatccttaaattttagatggttagatcatattacactttaaattaaattcgtgtgaaacttatctcctttcaacgaagggaacaaactgtcttattcttctcacccggtcaactctcagcttggctaatgcaaatttac

SEQ ID NO: 935 - protein, 280 aa, Glycine max
  misc_feature: Ceres Clone ID no. 557012
  misc_feature (1)..(280): Bit score of 613.3 for hmm based on sequences of FIGURE 8.
  misc_feature (19)..(187): Pfam Name: adh_short Pfam Description: short chain dehydrogenase
  misc_feature: Functional Homolog Of SEQ ID NO. 1012
MSTTGTVLASTPTQRLLGKVALVTGGASGIGESIVRLFHIHGAKICIADVQDNLGKQVCQSLGDEANVVFVHCDVTVEDDVSHAVDFTVGKFGTLHIIVNNAGISGSPCSDIRNADLSEFDKVFSVNTKGVFHGMKHAARIMIPKKKGSIISLCSVASAIGGLGPHAYTGSKYAVLGLTKNVAAELGKHAIRVNCVSPYGVATGLALAHLPEDERTDDALVSFRDFTGRMANLQGVELTTHDVANAVLFLASDDAKYISGENLMVDGGFTSANHSLQVFR

SEQ ID NO: 936 - DNA, 1022 bp, Glycine max
  misc_feature: Ceres Clone ID no. 1120962
  misc_feature: Encodes the peptide sequence at SEQ ID NO. 937
gctaatagaataggtttcacaccacactaaagccaattagtccctctcttctccctttccttttctctaaccaataatagagctttagaagaaagaaagaaagccatgcaagcatgttcctcctcagacgctccactctccaagaggttagatggcaaagtagcactcataaccggcggagccagtggcatcggtgaagccaccgccaagcttttccttcgccacggtgccaaggtcgtcatcgccgacatccaagacaacctcggacactccctatgccaaagtctcaattcctccgacaaaaacaacaacgacgacatttcctatgttcactgcgacgtcaccaacgacaaagacgtcgaaaccgccgtcaacgctgccgtctcgcgacacggcaagctcgacatcctcttcagcaacgccggcatcacgggccgttccgactgttctaactccatcacggccatcgacagcggtgacctgaagagggtcttcgaggtgaacgtcttcggtgccttctacgccgccaaacacgccgctaaggtcatgattcccagaaagaaagggagcattgttttcactgctagcatcgcttctgtgtcgaatgcgggttgggcgcacccgtacgcggcgtcgaagaacgcagtggtgggtttgatgaagaacctgtgcgtggaattggggaaacatggaatcagagttaactgtgtttcgccctatgcggtggggactccaatgctgacacgtgcgatgaggatggagaaggagaaagcagaggagatatatttggaggcggcgaacttgaagggagtggttttaaaggaaaaggatgtggcagaagcaactttgtttttggctagtgatgagtcaaaatacgtgagtggagtgaatctagttgtggacggaggttatactaccaccaattcttctgccaaacaagctttcacaaagttttcttttaatgtttaagcccaaattgaaagtttcaatttcagggttacttcgaccaaaagttttctgtt

SEQ ID NO: 937 - protein, 287 aa, Glycine max
  misc_feature: Ceres Clone ID no. 1120962
  misc_feature (1)..(287): Bit score of 489.9 for hmm based on sequences of FIGURE 8.
  misc_feature (18)..(193): Pfam Name: adh_short Pfam Description: short chain dehydrogenase
  misc_feature: Functional Homolog Of SEQ ID NO. 1012
MQACSSSDAPLSKRLDGKVALITGGASGIGEATAKLFLRHGAKVVIADIQDNLGHSLCQSLNSSDKNNNDDISYVHCDVTNDKDVETAVNAAVSRHGKLDILFSNAGITGRSDCSNSITAIDSGDLKRVFEVNVFGAFYAAKHAAKVMIPRKKGSIVFTASIASVSNAGWAHPYAASKNAVVGLMKNLCVELGKHGIRVNCVSPYAVGTPMLTRAMRMEKEKAEEIYLEAANLKGVVLKEKDVAEATLFLASDESKYVSGVNLVVDGGYTTTNSSAKQAFTKFSFNV

SEQ ID NO: 938 - DNA, 796 bp, Zea mays
  misc_feature: Ceres CLONE ID no.1589047
  misc_feature: Encodes the peptide sequence at SEQ ID NO 939
agttgcccccacccagaccaaacccaggcttcccgttccctcgcttttgtccggcggccatggcggaggagcagcagcatcagagatggcaggagggccaccgcctgtgcgccaacaattgcggcttcttcggcagccccgcgacgctggacctctgctccaagtgctaccgcgacctataccagcagcagccagcaggcgcggcggcgggcccctccgctcccaccgcgtcggccttccagcattcctcctcggcagtctccggcgcggcggcggtctctcccgatctcgaacctcccgcgacggcccctgctggcgccaaggcgggcaggtgctccagctgccggaagcgcgtgggcctgacggggttcgcgtgccgctgcggagctaccttctgcggcgtgcaccgctacccggagcggcacgcgtgcgccttcgatttccgggccgccggccgcgacgccatcgcgcgcgccaaccccgtcgtcaagggcgataagctcaaggacaagatctgaggagcaggaaccgccgcctctcgcttcagagttcatgtcttccccccgtcagcggaactccggaagagcaaggacgaccgacggccagaagggacggatcgtcggattgtacgaattactcccgtgtactctacgattggtataaaacccaagcccgtcggttcgattgtgtaaagctggcggtgaaatcgctggccgtttactgaatgaaaaaaaattcaaatagaaaaatatttacttttcaaaaaaaaaaaaaaaaaaaaaaaaaaaaaaaaaaa

SEQ ID NO: 939 - protein, 152 aa, Zea mays
  misc_feature: Ceres CLONE ID no.1589047
  misc_feature: Bit score of 257.4 for HMM based on sequences of FIGURE 7.
  misc_feature (14)..(38): Pfam Name: zf-A20 Pfam Description: A20-like zinc finger
  misc_feature (92)..(132): Pfam Name: zf-AN1 Pfam Description: AN1-like Zinc finger
  misc_feature: Functional Homolog Of Ceres SEEDLINE ID no. ME04477 at SEQ ID NO. 742
MAEEQQHQRWQEGHRLCANNCGFFGSPATLDLCSKCYRDLYQQQPAGAAAGPSAPTASAFQHSSSAVSGAAAVSPDLEPPATAPAGAKAGRCSSCRKRVGLTGFACRCGATFCGVHRYPERHACAFDFRAAGRDAIARANPVVKGDKLKDKI

SEQ ID NO: 940 - DNA, 1187 bp, Glycine max
  misc_feature: Ceres Clone ID no. 1364258
  misc_feature: Encodes the peptide sequence at SEQ ID NO. 941
attgaattcaacctttcatttcgtcactcttgcctgcatatagttttcctcctagctagatacatgatcaagtcctcctccatggcttcaattgccaaaatgcttgaaggcaaagtggcgataatcacaggaggagcaagtggcattggtgccgccaccgccaagctattcgtccaacacggcgccaaagtaatcattgccgacgtgcaagacgagttaggccagttccactgcaaaaccctcggcacaacaaacattcactacgtccactgcgacgtaaccagcgactccgacgtcaaaaacgtggtcgaatttgccgtgtccaagtatggcaagctcgacataatgtacaacaacgccggcatctccggagactcaaatcgctccataacgacatccgacaacgaaggctttaagaatgttttcggggttaacgtgtacggagctttcttgggcgccaagcatgccgctagggtcatgatccccgcaaagagaggggttattctcttcacctcaagcgttgcttcgcttctcggcggcgaaacaacgcacgcttacgctgtttcgaagcacgcggtggtggggctaatgaagaacctgtgcgtggaacttggggaacatgggatcagagtgaattgcgtttgtccaggtggaattcccactccgatgctcaacaatgcgttgaagatgaacaagaaagagacgcaggaagtgctgtgtaaggttgcggtgttgaaaggaacggttcttgaagccgaggacatagccaaagctgcagtttatttgtgcagcgacgaggccaagtttgtgagtggagttaactttgtcttggacggaggttatagcatcaccaataattctttcacttctgcgctcaacgctctcatcaacaacaaccatgcttagtaatggctagctatatatccattcccgcattttctgcccagttccatgtgctgaaataattaagctacactatctactttctctgtatttttgtggtctttctgcaagatcgatcaggatggaacacttaattaccacagtttccccctctcatgcaacaatgtagtaccaactagctagttctttttcctaagtgaaaatgtgtgttatgtgatgtataatgatctatgttgatgttgtattcacaaaaataaaataacaataatcaatccgatcgagtg

SEQ ID NO: 941 - protein, 280 aa, Glycine max
  misc_feature: Ceres Clone ID no. 1364258
  misc_feature (1)..(280): Bit score of 482.4 for hmm based on sequences of FIGURE 8.
  misc_feature (17)..(184): Pfam Name: adh_short Pfam Description: short chain dehydrogenase
  misc_feature: Functional Homolog Of SEQ ID NO. 1012
MIKSSSMASIAKMLEGKVAIITGGASGIGAATAKLFVQHGAKVIIADVQDELGQFHCKTLGTTNIHYVHCDVTSDSDVKNVVEFAVSKYGKLDIMYNNAGISGDSNRSITTSDNEGFKNVFGVNVYGAFLGAKHAARVMIPAKRGVILFTSSVASLLGGETTHAYAVSKHAVVGLMKNLCVELGEHGIRVNCVCPGGIPTPMLNNALKMNKKETQEVLCKVAVLKGTVLEAEDIAKAAVYLCSDEAKFVSGVNFVLDGGYSITNNSFTSALNALINNNHA

SEQ ID NO: 942 - DNA, 1000 bp, Gossypium hirsutum
  misc_feature: Ceres Clone ID no. 100066601
  misc_feature: Encodes the peptide sequence at SEQ ID NO. 943
cagcctgttagctttctccaaatgaccatgcctgctcaagtgattcccgacaagacccttcaaggtctccatggtttgggtagagaaaacaattcttctcctcaccctagaaggttggaagggaaagttgctattgtgacgggaggagcaagagggattggggaggcaacagtgaggctttttgcaaggcatggtgctaaggtagtgatcgcagatgtggaagacacgcttggaactgcgttggctaattctttgtctccttgtgtcacttttgttcattgtgatgttagcctggaagaagacattgagaatttagtaagttcaacagtttcccgatatgggcggcttgatatcctttttaacaatgctggggtgcttgggaatcagagaaagcataaaagcattgttgatttcgacgtggatgagttcgataatataatgagagtgaacgtgaggggaatggcgctgggaatcaagcatgctgcacgtgcaatgattccccgaggtggtgggtgcatcatttcaacagccagtgttgctggagtgatgggtggccttggtccacatgcttacacggcttcgaaacacgccattgttggattgacaaagaacgcggcttgtgaactagggcggtatgggattagagtgaactgcatttctccattcggtgtggctacacctatgcttgtgaatgcatggagaagccacgacgatgaagaagaggaaaccggctttaactttgggattccatgccaacaagaaacggagaagacggaggagtttgtgagagggcttgccaatttgaaaggtccaatactcagggctaaagacatagctgaggctgctttatatcttgctggcgatgaatctaaatatgtaagtgggcataatcttgtagtggatggtggagtcacaacatcaagaaattgtgttggcttgtaaccccattattaaccctaattgtaaattttcgattaaataaatttatttttctccattt

SEQ ID NO: 943 - protein, 306 aa, Gossypium hirsutum
  misc_feature: Ceres Clone ID no. 100066601
  misc_feature (1)..(306): Bit score of 473.1 for hmm based on sequences of FIGURE 8.
  misc_feature (35)..(203): Pfam Name: adh_short Pfam Description: short chain dehydrogenase
  misc_feature: Functional Homolog Of SEQ ID NO. 1012
MTMPAQVIPDKTLQGLHGLGRENNSSPHPRRLEGKVAIVTGGARGIGEATVRLFARHGAKVVIADVEDTLGTALANSLSPCVTFVHCDVSLEEDIENLVSSTVSRYGRLDILFNNAGVLGNQRKHKSIVDFDVDEFDNIMRVNVRGMALGIKHAARAMIPRGGGCIISTASVAGVMGGLGPHAYTASKHAIVGLTKNAACELGRYGIRVNCISPFGVATPMLVNAWRSHDDEEEETGFNFGIPCQQETEKTEEFVRGLANLKGPILRAKDIAEAALYLAGDESKYVSGHNLVVDGGVTTSRNCVGL

SEQ ID NO: 944 - protein, 147 aa, Musa acuminata
  misc_feature: Ceres CLONE ID no.1748922
  misc_feature: Bit score of 336.9 for HMM based on sequences of FIGURE 7.
  misc_feature (11)..(35): Pfam Name: zf-A20 Pfam Description: A20-like zinc finger
  misc_feature (88)..(128): Pfam Name: zf-AN1 Pfam Description: AN1-like Zinc finger
  misc_feature: Functional Homolog Of Ceres SEEDLINE ID no. ME04477 at SEQ ID NO. 742
MAEEQRCQEGHRLCANNCGFFGSPATLNLCSKCYRDHRLKEEQERQQQPASSAAASAMLTVAKSFPASSPAVVVVDEEVSGASVPSRCARCRKRVGLTGFQCRCGATYCGVHRYAEQHDCTFDFKAAGRATIARANPVVKADKLHKI

SEQ ID NO: 945 - protein, 359 aa, Zea mays; identical to SEQ ID NO: 348
  misc_feature: Public GI ID no. 194705596
  misc_feature (1)..(359): Bit score of 414.2 for hmm based on sequences of FIGURE 11.
  misc_feature (38)..(205): Pfam Name: HSF_DNA-bind Pfam Description: HSF-type DNA-binding
  misc_feature: Functional Homolog Of SEQ ID NO. 364

SEQ ID NO: 946 - DNA, 1209 bp, Panicum virgatum
  misc_feature: Ceres Clone ID no. 1803957
  misc_feature: Encodes the peptide sequence at SEQ ID NO. 947
tggctgacctttcctgcccaaggagaagctaagcttagcgcaagtacggcacggcaccgcgaggcagcagtatgttccgagccgcgtggagtgttctccttctcgggggcaagagctcggccatgtccgccgccgtcagccgcttctccgcggcggccgcctcgcagaggctggccggaaaggtggcggtgatcactggcggcgcaagcggcatcggcaaggcgacggccgccgagttcgtcaggaacggcgcgagggtcgtcctcgccgacgtccaggacgaccttggccacgccgccgccgcggacctcggcgcggacgcagtggtctacacccgctgcgacgtcaccgacgaggcgcaggtcgctgccgccgtagacctcgccgtcgcgcgccacggccgcctcgacgtcgtcttcaacaacgccgggatcggcggcaacctggcgccggtccccgtgggcgccctggacatggacgacttcgaccgcgtcatggcggtcaacgcccgcgcgatggtggccggcgtcaagcacgccgcgcgcgtcatggtgccccgccgcgccggcagcatcatctgcacggctagcaccgcgggcgtggtgggcggcgtggcgctggcgccgtacagcgtgtccaaggccgccgtggttgggctggtgcgcgccgtggccggcgagctggcgcgctctggcgtgcgggtcaacgccatctcgcccaactacatcccgacgccgctggtgatggccgccatggccgagtggtaccccgggatgggcgtcgaggagcgcaggcgggtcgtggagagggacatgaacgagatggacgggccggtgctggaggtggaggacgtggcgcgggcggcgttgtacctcgcgtccgacgagtccaagtacgtcaacggccacaacctcgtcgtcgacggcgggttcacggtggggaaggcgcccaacatgccgaaacctgcacagtgaactcgttgccaagagagatgacatcatgcatggcttcgcttgttcgtctctgatttgttcttcccgttattgggattggaaaacatggttcgctccggtccttcattgttaacggcttgtcgtccataaaattactctgtgtcctccattggtccataatgttccaaatgtatttttgtaataacacataataacgagcattttccataaattttatgagtgatatattatccat

SEQ ID NO: 947 - protein, 300 aa, Panicum virgatum
  misc_feature: Ceres Clone ID no. 1803957
  misc_feature (1)..(300): Bit score of 338.0 for hmm based on sequences of FIGURE 8.
  misc_feature (37)..(205): Pfam Name: adh_short Pfam Description: short chain dehydrogenase
  misc_feature: Functional Homolog Of SEQ ID NO. 1012
MFRAAWSVLLLGGKSSAMSAAVSRFSAAAASQRLAGKVAVITGGASGIGKATAAEFVRNGARVVLADVQDDLGHAAAADLGADAVVYTRCDVTDEAQVAAAVDLAVARHGRLDVVFNNAGIGGNLAPVPVGALDMDDFDRVMAVNARAMVAGVKHAARVMVPRRAGSIICTASTAGVVGGVALAPYSVSKAAVVGLVRAVAGELARSGVRVNAISPNYIPTPLVMAAMAEWYPGMGVEERRRVVERDMNEMDGPVLEVEDVARAALYLASDESKYVNGHNLVVDGGFTVGKAPNMPKPAQ

SEQ ID NO: 948 - DNA, 1184 bp, Zea mays
  misc_feature: Ceres Clone ID no. 100811930
  misc_feature: Encodes the peptide sequence at SEQ ID NO. 949
gaagtcgagaacaagcatccatcctagctcactcttccacctgtctttctcagcctctctctattcctcttcactctctcgaatagatagagagacccgaggtagagcaagacctcgatcaacgagtgaagcaaagggcagcatgatgcaccggcttgtcgtcgaagctaggagaagagcagccccggtggcgatggccgccggcggggtggcgggcggcgagcggtggatgtcgtcgtcggcagccagcaaaggaaggctagtagggaagattgcgctgatcaccggaggcgcgagcgggctgggcaaggccgcggcccgcgagttcatcgaggaaggcgcgggggccgtagtcctcgcggacatcaactccaagctgggcctcgagacggcccacgagctgggcccggacgcccacttcgtgcactgcgacgtggccgtcgaggacagcgtcgccgcggccgtggacgccgccgtggcgcgccacggccggctggacgtcatgctcaacagcgccggcgtagtgggcccgctgaccccaggcacgtcgcgggtcgccagcctggacctggcgcagttcgactccgtcatgtccgtgaacgtgcgcgggacgctggccgggatcaagcacgccgcgcgcgccatgctggcggcggcgcccgcgggggcaggaggaggaggaggaggagcaggagggtcgatcctctgcatggcgagcgtcagcggcatcctcggcgggctgggcacgtacctgtactcggtgtccaagttcgccatcgcggggatcgtcaaggccgcggcggccgagctgtcgcgcctcggcgtccgcgtcaactgcatctcgccgtacgcggtgcccacgccgatggtgctgggccagttctccgcgatgctgggcggggcagccgacgaggcgcaggtggcggccatcgtcaggggcctcggggagctcaggggcgccacctgcgaggccgtcgacatcgccagggccgccgtgtacctggcctccgacgacgccaagtacgtgtctggccacaaccttgtggtcgacggtggcttcacgagctacaagcacatgaacctgcccttccctaccaagccacatgagtgacttaattgccagaagcttgtgattcaggtgtcattctgctactgtttgatttgtacaaaactgcacctaaccg

SEQ ID NO: 949 - protein, 322 aa, Zea mays
  misc_feature: Ceres Clone ID no. 100811930
  misc_feature (1)..(322): Bit score of 310.9 for hmm based on sequences of FIGURE 8.
  misc_feature (43)..(224): Pfam Name: adh_short Pfam Description: short chain dehydrogenase
  misc_feature: Functional Homolog Of SEQ ID NO. 1012
MMHRLVVEARRRAAPVAMAAGGVAGGERWMSSSAASKGRLVGKIALITGGASGLGKAAAREFIEEGAGAVVLADINSKLGLETAHELGPDAHFVHCDVAVEDSVAAAVDAAVARHGRLDVMLNSAGVVGPLTPGTSRVASLDLAQFDSVMSVNVRGTLAGIKHAARAMLAAAPAGAGGGGGGAGGSILCMASVSGILGGLGTYLYSVSKFAIAGIVKAAAAELSRLGVRVNCISPYAVPTPMVLGQFSAMLGGAADEAQVAAIVRGLGELRGATCEAVDIARAAVYLASDDAKYVSGHNLVVDGGFTSYKHMNLPFPTKPHE

SEQ ID NO: 950 - DNA, 1004 bp, Arabidopsis thaliana
  misc_feature: Ceres Clone ID no. 9683
  misc_feature: Encodes the peptide sequence at SEQ ID NO. 951
attcaatttttggtggtcttttcaaaagtggaaatacaacaaaacaatgtcgggacttagaagattggatggcaagatcgcaattataacaggcggagctagtgggattggagctgaagcggttaggttgttcacggaccatggagctaaagtggtcatcgtggacatacaagaagagcttggccaaaacctcgccgtttcgatagggctagacaaagcaagtttttaccgttgtaatgtaaccgacgagacggatgtcgagaacgccgttaagttcaccgttgaaaaacacggaaagcttgacgttctgtttagtaacgccggggtcttggaagcgtttggaagcgttcttgatttggatcttgaggcgtttgatcgaacgatggcggttaacgttcgcggtgcggctgcgtttatcaaacacgcggcacgttcgatggtggctagtggtactcgtggctccattgtatgtacgacgagtattgcggcagagataggtggtccgggacctcatagttacacggcttctaagcacgcgcttctcgggctgatccgatcagcgtgtgctggactggggcagtacggtattagagtcaacggtgttgcaccgtatggggttgccactgggatgactagcgcctacaatgaggaagcggtgaagatgcttgaagaatatggtgaagccctagggaatctcaaaggtgtggtgcttaaagctcgccacatcgcagaagcagctttgtttttggcttctgatgattcggtttatattagcggtcagaatctggtggttgatggtggttttagcgtcgttaagctcatgagcacgtgagaaacaactaaaaaatgagggcatagactctcttgacactttcattttatttcttgaataaaaattgaatttataagtactttcgatcattgtgttgtatgttaggctcttgagtttatataaaccttgagtttaataatttactttttcttttagtttctcaattctatat

SEQ ID NO: 951 - protein, 261 aa, Arabidopsis thaliana
  misc_feature: Ceres Clone ID no. 9683
  misc_feature (1)..(261): Bit score of 355.0 for hmm based on sequences of FIGURE 8.
  misc_feature (10)..(177): Pfam Name: adh_short Pfam Description: short chain dehydrogenase
  misc_feature: Functional Homolog Of SEQ ID NO. 1012
MSGLRRLDGKIAIITGGASGIGAEAVRLFTDHGAKVVIVDIQEELGQNLAVSIGLDKASFYRCNVTDETDVENAVKFTVEKHGKLDVLFSNAGVLEAFGSVLDLDLEAFDRTMAVNVRGAAAFIKHAARSMVASGTRGSIVCTTSIAAEIGGPGPHSYTASKHALLGLIRSACAGLGQYGIRVNGVAPYGVATGMTSAYNEEAVKMLEEYGEALGNLKGVVLKARHIAEAALFLASDDSVYISGQNLVVDGGFSVVKLMST

SEQ ID NO: 952 - protein, 267 aa, Vitis vinifera
  misc_feature: Public GI ID no. 157346155
  misc_feature (1)..(267): Bit score of 640.4 for hmm based on sequences of FIGURE 8.
  misc_feature (9)..(176): Pfam Name: adh_short Pfam Description: short chain dehydrogenase
  misc_feature: Functional Homolog Of SEQ ID NO. 1012
MLLCRLEGKVALITGGASGIGKCTAETFTQHGAKVVIADIQDELGHSVIEALGQTNASYVHCDVTDESQIKAAVDKTAATHGKLDIMFNNAGIVNNYKPRIMDNEKADFERVLSINVTGVFLGMKHAARVMVPAKSGSIISTASVSSNVGAAATHAYCCSKHAVLGLTRNAAIELGQFGIRVNCLSPYALATPLATNFLNLTAEELETAMNATANLKGVTLKAQDVANAALYLASDESRYVSGHNLFIDGGFTVANPSFHLFQYPDS

SEQ ID NO: 953 - protein, 173 aa, Prunus armeniaca
  misc_feature: Public GI ID no.5031281
  misc_feature: Bit score of 374.5 for HMM based on sequences of FIGURE 7.
  misc_feature (114)..(154): Pfam Name: zf-AN1 Pfam Description: AN1-like Zinc finger
  misc_feature (15)..(39): Pfam Name: zf-A20 Pfam Description: A20-like zinc finger
  misc_feature: Functional Homolog Of Ceres SEEDLINE ID no. ME04477 at SEQ ID NO. 742
MEHEETGCQPHPEGPILCVNNCGFFGSVATRNMCSKCHKDMMLKEEQAKLAASSFGNIVNGTSNSNGNEPVVAAGVDVQAHLVEPKTISLQPSFSFGSGSGGSGEAKPEGPKRCGTCNKRVGLTGFNCRCGHLFCAVHRYSDKHDCPYDYHTAARDVIAKANPVVKADKLEKI

SEQ ID NO: 954 - DNA, 999 bp, Panicum virgatum
  misc_feature: Ceres CLONE ID no.1775820
  misc_feature: Encodes the peptide sequence at SEQ ID NO 955
atcgccagcgcgcgcgccggccgatctgggggcgggctccgctccacccgaggctcgccgttgacggggtccgcgtccatcggtagcaatggcacaagagagctggaaacaagagtccgaggagactagagtccacgcgcctgaggcccctattctctgcataaacaactgtggtttctttggcagcagcatgacgaacaatatgtgctcgaagtgctatagggacttcatcaagttgatggaagctcctgtggtggaaaagaaggtgaccacatcagcatcttcttccacagcaccactggagacaaagcgagatgatgcgcctgccgctgctgccactgaagctgtggctgagaagcaagcagagcaagagcccccaaagccacccagcaaccggtgtctgacttgccgcaagaaggtcgggctgaccggcttcctctgccgttgcggggacaccttctgctccacgcaccgctacaccgactcccaccagtgcacctttgactataagaaggtggcacgggagcagatagccaagcagaatccagttgtgatggccgagaagataaacaagatctaatgaatggttgtgaagggattcatgcctgggttcctgagtcctcaagttcactataatcgataggttccttcgggtggtggtctgggttagcgtggtagtagggggtctcaattgtgtctatccttctcctttatcatggttccattctctgccggaaagatgcagtggttttgcgtcgtcacttcctctggaagtagtttaagtcgagaagataagattgcacatcaggtattgcttattctggtcctggagggccaagtgttgtatcgacatgtcattggttttgtatcgttgtatgttatcacgtgtgctggaaatcacagcaagtatgaagcttatctgatcctgctaccatcatgtttatgtgatcagatgaagttatagataagcatacatatcaaaaaaaaaaaaaaaaaaaa

SEQ ID NO: 955 - protein, 163 aa, Panicum virgatum
  misc_feature: Ceres CLONE ID no.1775820
  misc_feature: Bit score of 343.8 for HMM based on sequences of FIGURE 7.
  misc_feature (104)..(144): Pfam Name: zf-AN1 Pfam Description: AN1-like Zinc finger
  misc_feature (21)..(45): Pfam Name: zf-A20 Pfam Description: A20-like zinc finger
  misc_feature: Functional Homolog Of Ceres SEEDLINE ID no. ME04477 at SEQ ID NO. 742
MAQESWKQESEETRVHAPEAPILCINNCGFFGSSMTNNMCSKCYRDFIKLMEAPVVEKKVTTSASSSTAPLETKRDDAPAAAATEAVAEKQAEQEPPKPPSNRCLTCRKKVGLTGFLCRCGDTFCSTHRYTDSHQCTFDYKKVAREQIAKQNPVVMAEKINKI

SEQ ID NO: 956 - DNA, 960 bp, Panicum virgatum
  misc_feature: Ceres CLONE ID no.1787151
  misc_feature: Encodes the peptide sequence at SEQ ID NO 957
attctccgcggggggtaagggaaaggtcgcgtggcgtctcgcccacagtccatcggtagcaatggcacaagagagctggaaacaagagtccgaggagactagagtccacgcccctgaggcccctattctctgcataaacaactgtggtttctttggcagcagcatgacgaacaatatgtgctcgaagtgctatagggacttcatcaagttgatggaagctcctgtggtggagaagaaggtgaccacatcagcatcttcttccacagcaccactggagacaaagcgagatgatgcgcctgccgctgctgccactgaagctgtggctgagaagcaagcagagcaagagcccccaaagccacccagcaaccggtgtctgacttgccgcaagaaggtcgggctgaccggcttcctctgccgttgcgggggcaccttctgctccacgcaccgctacaccgactcccaccagtgcacctttgactataagaaggtggcacgggagcagatagccaagcagaatccagttgtgatggccgagaagataaacaagatctaatgaatggttgtgaagggattcatgcctgggttcctgagtcctcaagttcactatgatcgataggttccttagggtggtggtctgggttagcgtggtagtagggggtctcaattgtgtctatccttctcctttatcatggttccattctctgccggaaagatgcagtggttttgcgtcgtcacttcctctggaagtagtttaagtcgagaagataagattgcacatcaggtattgcttattctggtcctggagggccaagtgttgtatcaacatgtcattggttttgtatcgttgtatgttatcacgtgtgctggaaatcacagcaagtatgaagcttatctgatcctgctaccatcatgtttatgtgatcagatgaagttatagacaaaaaaaaaaaaaaaaaaaaa

SEQ ID NO: 957 - protein, 163 aa, Panicum virgatum
  misc_feature: Ceres CLONE ID no.1787151
  misc_feature: Bit score of 342.9 for HMM based on sequences of FIGURE 7.
  misc_feature (104)..(144): Pfam Name: zf-AN1 Pfam Description: AN1-like Zinc finger
  misc_feature (21)..(45): Pfam Name: zf-A20 Pfam Description: A20-like zinc finger
  misc_feature: Functional Homolog Of Ceres SEEDLINE ID no. ME04477 at SEQ ID NO. 742
MAQESWKQESEETRVHAPEAPILCINNCGFFGSSMTNNMCSKCYRDFIKLMEAPVVEKKVTTSASSSTAPLETKRDDAPAAAATEAVAEKQAEQEPPKPPSNRCLTCRKKVGLTGFLCRCGGTFCSTHRYTDSHQCTFDYKKVAREQIAKQNPVVMAEKINKI

SEQ ID NO: 958 - protein, 304 aa, Picea sitchensis
  misc_feature: Public GI ID no. 116784890
  misc_feature (1)..(304): Bit score of 489.5 for hmm based on sequences of FIGURE 8.
  misc_feature (28)..(195): Pfam Name: adh_short Pfam Description: short chain dehydrogenase
  misc_feature: Functional Homolog Of SEQ ID NO. 1012
MSNEEFNAAASSVGNLSFNGSERRLKGKVAIITGGASGIGEAIVRLFTKHGAKVILADIADEAGRNLAGSLSPPATYVHCDVSKEQDVRAAVDLAMEKHGQLDIMYNNAGTIEFVAVESVAEYEMLQFDRVMSVNVRGAMLGIKHAARVMIPRKKGCIISTASVAGILGGLTPYAYTASKHAILGLTKNGAAELGKYGIRVNTVSPSGVATALLVNYNKQGNGSVVSEDDKAAVEAYCTSIGNLEGATLRAEDIAEAGLYLASDEAKYVSGHNLVVDGGFSVVNHSWKLYRKKQESLTTSTSLG

SEQ ID NO: 959 - protein, 278 aa, Dysosma versipellis
  misc_feature: Public GI ID no. 182260552
  misc_feature (1)..(278): Bit score of 469.1 for hmm based on sequences of FIGURE 8.
  misc_feature (17)..(186): Pfam Name: adh_short Pfam Description: short chain dehydrogenase
  misc_feature: Functional Homolog Of SEQ ID NO. 1012
MGFTSTSASSTNRLQDKVAIITGGAGGIGETTAKLFVRYGAKVVIADISDDHGQKVCKNIGSPDVISFVHCDVTEDEDVRNLVDATIAKHGKLDIMFGNVGVLGTTPYSILEAGNEDFKRVMDINVYGAFLVAKHAARVMIPAKKGSIVSTASISSFTAGEGVSHVYTATKHAVLGLTTSLCTELGQYGVRVNCVSPYIVASPLLTDVFRVDSSRVEELAHQAANLKGTLLRAEDVADAVAYLAGDESKYVSGLNLVIDGGYTRTNPAFPTALKHGLA

SEQ ID NO: 960 - protein, 295 aa, Populus balsamifera subsp. trichocarpa
  misc_feature: Public GI ID no. 118484640
  misc_feature (1)..(295): Bit score of 399.3 for hmm based on sequences of FIGURE 8.
  misc_feature (36)..(202): Pfam Name: adh_short Pfam Description: short chain dehydrogenase
  misc_feature: Functional Homolog Of SEQ ID NO. 1012
MFKIGFRRASISRSVSLAQVFNKGFSSQPGSKLEGKVALITGAASGIGKATAAKFINHGARVVIADIQHQLGQETANELGPDATFISCDVTKESDVSGAVDFAISKYNQLDILYNNAGVACKSPHSIVDLDLAVFDRIMNINVRGVMAGVKHASRVMIPRRSGAILCTASITGLMGGLAQHTYSVSKFAVAGIVKSLAAELCKHGIRINCISPFAIPTPFVMEEMRQIYPGADDEKLVEILYRTGTLEGANCEPNDIANAALYLASDDAKYVSGHNLVVDGGFTSFKNPMLPASI

SEQ ID NO: 961 - protein, 329 aa, Physcomitrella patens subsp. patens
  misc_feature: Public GI ID no. 168001260
  misc_feature (1)..(329): Bit score of 301.7 for hmm based on sequences of FIGURE 8.
  misc_feature (60)..(225): Pfam Name: adh_short Pfam Description: short chain dehydrogenase
  misc_feature: Functional Homolog Of SEQ ID NO. 1012
MVYSMWHLRTCLRQNGLSNVFKKARTVTPDVYSSPRYCHRSSLHRESSTCPSWGDRFAGKVVVVTGGASGIGEATARLFAKNGAYVVIADINTEGGSQLSSELGSQAQFVHCDVRKERDVASLVDEAVRWKGKLDVYFSNAGFVGALGSIDELNLDDFDETLAVNLRGAVVGIKHATRVMKPVKSGAIVCTGSTASQMGGLGPHTYCVSKTALKGLVRSTALELRSYGIRVNMVSPDATATPMFQRVMEDSTGEPYTLEQIKERMAKKALLPNRPLTSLDVANAVLFLCSDEAGYISGHNLLLDAARTVGLPIPPGFSHWFEGYSPILK

SEQ ID NO: 962 - protein, 260 aa, Arabidopsis thaliana
  misc_feature: Public GI ID no. 186510565
  misc_feature (1)..(260): Bit score of 350.2 for hmm based on sequences of FIGURE 8.
  misc_feature (9)..(176): Pfam Name: adh_short Pfam Description: short chain dehydrogenase
  misc_feature: Functional Homolog Of SEQ ID NO. 1012
MSGLRLDGKIAIITGGASGIGAEAVRLFTDHGAKVVIVDIQEELGQNLAVSIGLDKASFYRCNVTDETDVENAVKFTVEKHGKLDVLFSNAGVLEAFGSVLDLDLEAFDRTMAVNVRGAAAFIKHAARSMVASGTRGSIVCTTSIAAEIGGPGPHSYTASKHALLGLIRSACAGLGQYGIRVNGVAPYGVATGMTSAYNEEAVKMLEEYGEALGNLKGVVLKARHIAEAALFLASDDSVYISGQNLVVDGGFSVVKLMTT

SEQ ID NO: 963 - protein, 265 aa, Mentha haplocalyx var. piperascens
  misc_feature: Public GI ID no. 148887811
  misc_feature (1)..(265): Bit score of 270.5 for hmm based on sequences of FIGURE 8.
  misc_feature (10)..(179): Pfam Name: adh_short Pfam Description: short chain dehydrogenase
  misc_feature: Functional Homolog Of SEQ ID NO. 1012
MASVKKLAGKVAIVTGGASGIGEVTARLFAERGARAVVIADMQPEKGGTVAESIGGRRCSYVHCDITDEEQVRSVVDWTASTYGGVDVMFCNAGTASATAQTVLDLDLTQFDRVMRVNARGTAACVKQAARKMVELGRGGAIICTASATAHHAGPNLTDYIMSKCGVLGLVRSASLQLGVHGIRVNSVSPTALATPLTATIGLRTAADVESFYGQVTSLKGVAITAEHVAEAVAFLASDEAAFVTGHDLAVDGGLQCLPFVAVAK

SEQ ID NO: 964 - protein, 265 aa, Mentha x piperita
  misc_feature: Public GI ID no. 158979021
  misc_feature (1)..(265): Bit score of 270.0 for hmm based on sequences of FIGURE 8.
  misc_feature (10)..(179): Pfam Name: adh_short Pfam Description: short chain dehydrogenase
  misc_feature: Functional Homolog Of SEQ ID NO. 1012
MASVKKLAGKVAIVTGGASGIGEVIARLFAERGARAVVIADMQPEKGGTVAESIGGRRCSYVHCDITDEEQVRSVVDWTAATYGGVDVMFCNAGTASATAQTVLDLDLAQFDRVMRVNARGTAACVKQAARKMVELGRGGAIICTASATANHAGPNLTDYIMSKRGVLGLVRSASLQLGVHGIRVNSVSPTALATPLTATIGLRTAADVESFYGQVTSLKGVAITAEHVAEAVAFLASDEAAFVTGHDLAVDGGLQCLPFVAVAK

SEQ ID NO: 965 - DNA, 507 bp, Brassica napus
  misc_feature: Ceres Clone ID no. 965131
  misc_feature: Encodes the peptide sequence at SEQ ID NO. 966
acaataattctctttcactcgttcgacgagaaaaatcaaaatcaagagaagaaaaaagataatctaaaagggttcgatttgccacgcaatgtctggagaagaagaagagaacgccgccgagctcaagatcggcgacgagtttttgaaggcgaagtgcttaatgaactgtgaagtgtcgttgatcctcgagcacaagtacgaacagcttcagcacgtctccgaggatcctatgaatcaagtttctcaagtgtttgagaagtcgttgcagtatgtgaagcgatttagccgctacaagaatccagatgctgttcgacaagttcgagaaatcctgagtagacatcagctcactgagtttgagctttgtgttcttggcaatctctgtcctgaaactgctgaagaagcagtggctatggttccctccctcaagacaaaaggaagagctcatagtgatgaagcaattgagaagatgctcaatgatctctcacttgtcaagagatttgagtagtt

SEQ ID NO: 966 - protein, 138 aa, Brassica napus
  misc_feature: Ceres Clone ID no. 965131
  misc_feature (1)..(138): Bit score of 372.0 for hmm based on sequences of FIGURE 1.
  misc_feature (19)..(135): Pfam Name: RNA_pol_Rpb4 Pfam Description: RNA polymerase Rpb4
  misc_feature: Functional Homolog Of SEQ ID NO. 442
MSGEEEENAAELKIGDEFLKAKCLMNCEVSLILEHKYEQLQHVSEDPMNQVSQVFEKSLQYVKRFSRYKNPDAVRQVREILSRHQLTEFELCVLGNLCPETAEEAVAMVPSLKTKGRAHSDEAIEKMLNDLSLVKRFE

SEQ ID NO: 967 - DNA, 487 bp, Glycine max
  misc_feature: Ceres Clone ID no. 1050944
  misc_feature: Encodes the peptide sequence at SEQ ID NO. 968
atctctcgttcgattcttggcattccacttctcgccctcgttctttttttgcgttttcttcttcttcttcttcttcttcttcttcttcttctcactttttacctaagattttgtggaacatgtccggggaagaggaagaaaacgccgcagagctcaaaattggagacgagtttttgaaggcaaagtgcttaatgaactgtgaagtttcattgattcttgagcacaagtatgagcagcttcaacagacatctgatgatcccatgaatcaaatttctcaggtatttgaaaagtcactgcagtatgtgaaacgtttcagtcgctataaaaatcctgatgctgtcagacaagttcgagaaattctcgcaagatatcaattggctgagtttgagttgtgtgtccttggcaacctttgcccagaaactgtggaggaagctattgctatggttccatctatcaagtccagaggacgagctcaggatgatgaagc

SEQ ID NO: 968 - protein, 122 aa, Glycine max
  misc_feature: Ceres Clone ID no. 1050944
  misc_feature (1)..(122): Bit score of 305.5 for hmm based on sequences of FIGURE 1.
  misc_feature (19)..(122): Pfam Name: RNA_pol_Rpb4 Pfam Description: RNA polymerase Rpb4
  misc_feature: Functional Homolog Of SEQ ID NO. 442
MSGEEEENAAELKIGDEFLKAKCLMNCEVSLILEHKYEQLQQTSDDPMNQISQVFEKSLQYVKRFSRYKNPDAVRQVREILARYQLAEFELCVLGNLCPETVEEAIAMVPSIKSRGRAQDDE

SEQ ID NO: 969 - protein, 138 aa, Elaeis guineensis
  misc_feature: Public GI ID no. 192910802
  misc_feature (1)..(138): Bit score of 363.5 for hmm based on sequences of FIGURE 1.
  misc_feature (19)..(135): Pfam Name: RNA_pol_Rpb4 Pfam Description: RNA polymerase Rpb4
  misc_feature: Functional Homolog Of SEQ ID NO. 442
MSGEEEENAAELKIGEEFLKAKCLMNCEVALILDRKYEQLQQLSDDPTNQISQVFEKSMQYVKRFSRYKNQDAVRQVREILSRYRLAEFELCVLGNLCPETVEEAIAMVPSIKSKGRIHEDDAIEKMLNDLSLIKKFE

SEQ ID NO: 970 - protein, 142 aa, Physcomitrella patens subsp. patens
  misc_feature: Public GI ID no. 168028875
  misc_feature (1)..(142): Bit score of 281.8 for hmm based on sequences of FIGURE 1.
  misc_feature (24)..(139): Pfam Name: RNA_pol_Rpb4 Pfam Description: RNA polymerase Rpb4
  misc_feature: Functional Homolog Of SEQ ID NO. 442
MASRSGQPVEEEDASELKLGEDFVKAKCLMNAEVALVLQRKYEQLQQLADDPSSQISQVFERSLQYVRRFSRYQNPDAVKQVREVLTRNQLHEFEVCVIGNLCPETVEEAKALVPSITKRGRMDEEKIETMLTDLATIKKFE

SEQ ID NO: 971 - protein, 349 aa, Zea mays
  misc_feature: Public GI ID no. 194704162
  misc_feature (1)..(349): Bit score of 834.1 for hmm based on sequences of FIGURE 4.
  misc_feature (76)..(346): Pfam Name: Sulfotransfer_1 Pfam Description: Sulfotransferase domain
  misc_feature: Functional Homolog Of SEQ ID NO. 590
MSSSSVQQTAFPEQEADAEGETNPELYQHFANLVSSLPSSKGLSNNKFYRHGQGWHCSEVGIVGAMVTDACFSARPSDVIIATLPKSGTTWMKSLLYATVHRRERPVVGAAAADQHPLNSWGPHDLIKFFEYQLYTRDRVPDLDRLPDPRLFATHVPFVSLPSSVVATPGCKIVYVCRDPKDHLVSLWDFVNKYFRVKDGLEPLSVEAAAELFCAGLTPFGPYWDHVLGYWRAHRADPDKVLFFRYEEMQRDPAAHVRRLAEFVGLPFSSEEEDGGVVDAVVGLCSFERMRGMAPTKGGRTEFPIGVVPNSSFFRQGVVGDWVNHLSPEMARRIDAITADKFRGSGLVV

SEQ ID NO: 972 - DNA, 770 bp, Panicum virgatum
  misc_feature: Ceres CLONE ID no.1765871
  misc_feature: Encodes the peptide sequence at SEQ ID NO 973
gttggctaacaatcccattgctgcgctgcagcccatctgtagcaatggcacaggagagctggaaacaggagtccgaggagactggagtccatgcgcctgaggccccaattctgtgcataaacaactgtgttttcttcggcagcagcatgacaaacaatatgtgctcgaagtgctacagggacttcatcaagttgatggaagcccctgtggttgagaagaaggtgatcacggtggcatcttcttctgcggcaccaatggagacagcaaatcaagatgatgtgcctgcagctgctgccgctgaagctgttgcggagaagcaagcagagcaggagccgccaaagccgcccagcaaccggtgcctgacctgccgcaagaaggttgggctgaccggctttctctgccgctgtgggggcaccttctgctccatgcaccgctacaccgactcccaccagtgcacctttgactacaagaaggtggcacgggagcagattgccaagcaaaatccagttgtgatggcagagaagatcaacaagatatgatgcatggtcgtgtgcagggattgctgaattcatgcctgagttcctgagtcctcaagttcactccaaacgataggttccttcaggtggtggtctgggttagcgtggtagggggtctcaattgtgtctatccttctcctttatcatggtttcattctctcgattgtgtaataatgtaaatatattcaaactgtaatttaatcatattgcttccaaaaaaaaaaaaaaaaaaaa

SEQ ID NO: 973 - protein, 164 aa, Panicum virgatum
  misc_feature: Ceres CLONE ID no.1765871
  misc_feature: Bit score of 328.4 for HMM based on sequences of FIGURE 7.
  misc_feature (105)..(145): Pfam Name: zf-AN1 Pfam Description: AN1-like Zinc finger
  misc_feature (21)..(45): Pfam Name: zf-A20 Pfam Description: A20-like zinc finger
  misc_feature: Functional Homolog Of Ceres SEEDLINE ID no. ME04477 at SEQ ID NO. 742
MAQESWKQESEETGVHAPEAPILCINNCVFFGSSMTNNMCSKCYRDFIKLMEAPVVEKKVITVASSSAAPMETANQDDVPAAAAAEAVAEKQAEQEPPKPPSNRCLTCRKKVGLTGFLCRCGGTFCSMHRYTDSHQCTFDYKKVAREQIAKQNPVVMAEKINKI

SEQ ID NO: 974 - protein, 332 aa, Vitis vinifera
  misc_feature: Public GI ID no. 157357874
  misc_feature (1)..(332): Bit score of 680.2 for hmm based on sequences of FIGURE 4.
  misc_feature (67)..(326): Pfam Name: Sulfotransfer_1 Pfam Description: Sulfotransferase domain
  misc_feature: Functional Homolog Of SEQ ID NO. 590
MSITHSTKTQSTNDEEELSDEFKELLLSLPKERGWRTSHIYLYQEFWCQPKEIQAIINFQQHFQARDSDLILVTMPKSGTTWLKAMAFAVLNRKSFSISKNHPLLTSNPHDLVPFLEYKLYANNQLPDLSMLPQPRLLATHVPFSSLPASIKNSDCRIVYWCRNPLDTFVSSWHFLMKVRPETLGPISIEEGFEMYCRGAMAFGPFWKHMLEYWNESLEPPNKMLFMKYEDAKEDPVFQLKRLANFLGVPFSFEEEREGVAEEISRLCSFENLKNLEVNQTGRSIGYFENKNLFRTGVVGDWVNHLTPSMAGQIFQIMKGKLAGSGLEFKVF

SEQ ID NO: 975 - protein, 330 aa, Populus balsamifera subsp. trichocarpa
  misc_feature: Public GI ID no. 118486287
  misc_feature (1)..(330): Bit score of 597.8 for hmm based on sequences of FIGURE 4.
  misc_feature (65)..(323): Pfam Name: Sulfotransfer_1 Pfam Description: Sulfotransferase domain
  misc_feature: Functional Homolog Of SEQ ID NO. 590
MEDTQMITGNNNSLAETDEIADLLSSLPKEKSWRLGYLYRYQGFWCPEKQIPAVIAFQKHFIAQKTDTILVTMPKSGTTWLKALAFSIMNRAKYTPSCSPLNSVNPHDLVPFFEFRLYANNQLPDLSTFPSPRMFATHVPYPSLPDSIKNSGCRIVCLCRNPFDNFISLWHFASKARHESLGPLSMEDCFDSFCNGLGGFGPFFDHVLGYWRESLERPEEVLFLTYEDMKEDINSQMKRLAEFLGCPFSLEEEADGVVEGISKLCSFSNMKDKEINKTGKSIPHFENKTLFRRGEVGDWVNYLSPEMVDRLNKIMEQKLAGSGLKFKTGL

SEQ ID NO: 976 - DNA, 1598 bp, Panicum virgatum
  misc_feature: Ceres CLONE ID no.1990071
  misc_feature: Encodes the peptide sequence at SEQ ID NO 977
gccttcgcctacctctcgacgcccaaccccaaaaagaaaaattctcctcgcggagaaaggtcgcgtgccgtctcgcccacaggttggcggcgggcttcgcgtcgaggcgcggccggttggttctggatcggatctgcgcggattggaattgggttgacccggtgggtttggtggcacagggtctgcgcgcctctgttacggaggatttgggctcgcctgtgggtattttccctttaattatttgcagatcatttgcggtggtttgttttctaggctggcactggcaggcgagacctcaacctttgtgaacagcggagggggtgaatcagtgaaggatagcgagtccgtccgcgtggttgatgaacaaactttggtggttgccggcggatgtgggagtgggttcatcctggcgccgccgggtgcacgccgcggcgtgcgtggctgcttgcttgtcgcagggctcttccatccctgcgtcacatgcgagcttcgtgccaattcgtgaagcaggcgagagatgtttgctgataaggtctcctgtggcccttgtgtagggggtggatgaagcggcgagcttcctttccgtgctcggcgtgggtarccttgattgtggccagaggtttcgtgctggccatggcaaggtctattgcttggacgtgtggataaaggtttgactgcctgaattggctgtgtgcatctacctgattgcagttccgggcactgattgcttcgcctgtatgctgctggttgcctgccttgtgctgctactacatatgcaatctgtggagcaaccaaaaagaccttggcttcatgctatgattgtgtcaagcaattgactaaccacgcccatctgttgcaatggcacacgagagctggaaacaggaatctgaggagactggagtccatgcacctgaggccccaattctgtgcataaacaactgtggtttyttcggcagcagcatgacgaacaatatgtgctcgaagtgctmcagggacttcatcaaattgwtggaaggccctgtggttgagaagaaggtgatcacggtggcatcttcttctgcggcaccaatggagacagcaaagcaagatgatgtgcctgcagctgctgccactgaagctgtgacggagaagcaagcagagcaggagcccccaaagccgcccagcaaccggtgccttacctgccgcaagaaggttgggctgactggcttcctctgccgctgcgggggccccttttgctccatgcaccgctacactgactcccaccagtgcaccttcgactacaagaaggtggcacgggagcagattgccaagcaaaatccagttgtgatggcagagaagattaacaagatatgatgcatagtcatgtgaagggatcactaaattcatgcctgggttcactccaaatgataggttccttcaggcggtggtctgggtctgggttagagtggtagctggtctcaattgtgtctatccccctttatcatggtttcattctctcgattgtgtaataatgtaaatatattcaaactgtaatttaatcctattgcttcctactacgattgatgggtttgatgggtttatcgctgatcatggctttc

SEQ ID NO: 977 - protein, 164 aa, Panicum virgatum
  misc_feature: Ceres CLONE ID no.1990071
  misc_feature: Bit score of 309.4 for HMM based on sequences of FIGURE 7.
  misc_feature (105)..(145): Pfam Name: zf-AN1 Pfam Description: AN1-like Zinc finger
  misc_feature (21)..(45): Pfam Name: zf-A20 Pfam Description: A20-like zinc finger
  misc_feature: Functional Homolog Of Ceres SEEDLINE ID no. ME04477 at SEQ ID NO. 742
  misc_feature (30)..(30): Xaa is any aa, unknown, or other
  misc_feature (44)..(44): Xaa is any aa, unknown, or other
  misc_feature (51)..(51): Xaa is any aa, unknown, or other
MAHESWKQESEETGVHAPEAPILCINNCGXFGSSMTNNMCSKCXRDFIKLXEGPVVEKKVITVASSSAAPMETAKQDDVPAAAATEAVTEKQAEQEPPKPPSNRCLTCRKKVGLTGFLCRCGGPFCSMHRYTDSHQCTFDYKKVAREQIAKQNPVVMAEKINKI

SEQ ID NO: 978 - protein, 343 aa, Vitis vinifera
  misc_feature: Public GI ID no. 157357554
  misc_feature (1)..(343): Bit score of 591.9 for hmm based on sequences of FIGURE 4.
  misc_feature (62)..(320): Pfam Name: Sulfotransfer_1 Pfam Description: Sulfotransferase domain
  misc_feature: Functional Homolog Of SEQ ID NO. 590
MEKSEVPQEEPCKDDEFQKLLLTLPEERNWDGTSLYLYQGFWCPSIAIKPVFSFQQHFQALGSDLILASTPKSGTTWLKALTFSILNRTRYTLNDSPLHTTSPHGLVPFVEFDVYLKNKSPNLMLLPSPRIFATHVPYGSLPSSIKESNCRIVYVCRNAVDQLISYWHFALKLRRGNVKPLSLDEGFEKFCHGVHSFGPFAEHVLGYWKANLDRPKNVLFLKYEDMKEDVFSHTKRLAEFLGCPFSAMEEKQGVIQEICGLCSFENLKDLEVNKSGKRPSGVPNSAFFRNGKVGDWGDHLSPSKAEYLEKLIEEKLSGSGLTLKICPKFQKEDECKPSSEMEA

SEQ ID NO: 979 - protein, 339 aa, Brassica rapa subsp. chinensis
  misc_feature: Public GI ID no. 197090699
  misc_feature (1)..(339): Bit score of 390.7 for hmm based on sequences of FIGURE 4.
  misc_feature (72)..(333): Pfam Name: Sulfotransfer_1 Pfam Description: Sulfotransferase domain
  misc_feature: Functional Homolog Of SEQ ID NO. 590
MEPTTTQNGSELELELSEFEKTQKKYQDFIASLPKSKGWRPKEILIQHGGHWWQECLLEGLLHAKDHFQARPTDFLVCSYPKTGTTWLKALTYAIVNRSRFDDATNPLLKRNPHEFVPYVEIDFAFYPTVDVLQDQKNPLFSTHIPNGSLPDSIVNSGCKMVYIWRDPKDTFISMWTFLHKEKSQEGQLASLEESFDMFCKGLSVYGPYLDHVLGYWKAYQENPERILFLRYETMRANPLPFVKRLAEFMGYGFSAEEEEKGVAENVVKLCSFETLKNLEANKGDKEREDRPAVYANSAYFRKGKVGDWANYLTPEMAARIDGLVEEKFRDTGLLEHDQ

SEQ ID NO: 980 - protein, 323 aa, Populus balsamifera subsp. trichocarpa
  misc_feature: Public GI ID no. 118486878
  misc_feature (1)..(323): Bit score of 380.6 for hmm based on sequences of FIGURE 4.
  misc_feature (63)..(321): Pfam Name: Sulfotransfer_1 Pfam Description: Sulfotransferase domain
  misc_feature: Functional Homolog Of SEQ ID NO. 590
MSDASKISESPNTKNKYEKIISNLRQDDGWKPVGKLYEYQGFWYGPSLVQNVISAQESFTPQPTDIVLCSSPKSGTAWLKALAFSIVSRNRVNDSTNPLLKKLPHEIVPFLEIELAQDSNNRNLETPFVATHIPYSSLPRSIIDSSCKIIYICRDPKDVLISHWNFDQQVSGIGSESFPLEEALEQYCKGIYPFGPYWDHVLGFWKASLEFPEKVLFVKYEDLKTDGPFHVKRMAKFMGHPFSIEEEQQGAPEKIVSMCSFENLSRLEVNKNGKYYLPDLPTFENKSFFRKGKAGDWKNYLTDGKAVKFNQIMEEKFSGSGLV

SEQ ID NO: 981 - protein, 321 aa, Hordeum vulgare
  misc_feature: Public GI ID no. 63147804
  misc_feature (1)..(321): Bit score of 272.6 for hmm based on sequences of FIGURE 4.
  misc_feature (43)..(314): Pfam Name: Sulfotransfer_1 Pfam Description: Sulfotransferase domain
  misc_feature: Functional Homolog Of SEQ ID NO. 590
MKMKSLSLQTRCPPDPMAQHGGFWFPGYIVEAMEAVALFEPRASDVLLASFPKSGTTWLKALAFAAVHRAEHPPHSPDHPLRHRNPHQCVEFLEFAFAESATTADDVFAALPSPRVLATHLPYSLLPERVTVTAEAGRIVYICRDPKDTLVSMWMFAKKCMAVAGSGTAVEEEDTFTFKEAFELFCQGQCANGPPWHHVAGYWEASQRWPDKVLFLRYEELLQDPVGNVRKLAGFMGRGFSEDEEAAGLLQQIVELCSFHALKNMKVNKSGTVYDLKNESFFRNGVAGDWTNHMTPAMAAMLDKIVHDALGLQGSGFTFRP

SEQ ID NO: 982 - DNA, 1313 bp, Panicum virgatum
  misc_feature: Ceres Clone ID no. 1819939
  misc_feature: Encodes the peptide sequence at SEQ ID NO. 983
caagctcggtggatctagagcagcacaatgaccaccaccggcgccgggaaggacgacgtcgagggcctgaagcaggcaatggcggccggcgcgggcatcgccgacctcatcccttcgctgcccctcgagacgaggtgccagccgttcctcctccgtcagctcggcggcttctggctgcccgagatgttccttcccggggtcgccgccgcgcacgcgcgcttcaagcccaggcccgacgacgtcttcctcgccagcttccccaagtccggcacgacctggctcaaggcactcaccttcgctacgctcaaccgggcccaccacccgccgtccgaccctgaccacccactccggctccaaagcccccacgactgcgtcagcttcttcgagcttcccttggccctcgctgcggccagcagcaacggcggcggcggaggggacagggaggaggaggaagaagcgttcgcggcgctcccttcgccgcgcgtgctcgccacccacctgccctaccacctcctgccggagcgcatcaccgcggagagctccggctgccgcgtcgtctacgtctgccgggactccaaggacgcgttcgtatccgcgtgggtgttcaccaagaagacagcggccgcaaaggccgccgccggcgaggccccaccgccgccgccgtacccgctcgagtcagcgttcgagctgttctgcgacggccgcagcgtcggcggcccgcagtggctgcacgtgctcgggtactgggaggcgagcctgcggcggccggacagggtgctcttccttcagtacgaggacatgctccgggacccggtgagcagcgtgaggaagcttgccgagttcttgcgctgcccgttctccggcgaggaggaggcggcgggcgcggtgggcgccgtcgtggagctctgcagcctgggcagcctccaggggtccaaggggaaccggagcggcaagacgaaggatatgagcatcgacaacgggctgttcttccggaagggcgaggcgggggactggcgcaaccacctgtcgccggagatggcggcgcggctggaccagatcgtcggcgaggcgctgcaagggtcggggctcacgttgggtggcgtcgccggcgccgcgcgcgacgacgacgacgactctgcgtgagccgccggcacgtttggcgacatgcagatgcaaatgcaggtgacgctggaactggtattcactcgcgtgattcctgagcgttttgctgagtaaatgggggtgctatgcgcacctccaaggctcagaaccagaataagtttactcaacatgcatgtatgtgcgagcgactt

SEQ ID NO: 983 - protein, 371 aa, Panicum virgatum
  misc_feature: Ceres Clone ID no. 1819939
  misc_feature (1)..(371): Bit score of 363.4 for hmm based on sequences of FIGURE 4.
  misc_feature (69)..(353): Pfam Name: Sulfotransfer_1 Pfam Description: Sulfotransferase domain
  misc_feature: Functional Homolog Of SEQ ID NO. 590
MTTTGAGKDDVEGLKQAMAAGAGIADLIPSLPLETRCQPFLLRQLGGFWLPEMFLPGVAAAHARFKPRPDDVFLASFPKSGTTWLKALTFATLNRAHHPPSDPDHPLRLQSPHDCVSFFELPLALAAASSNGGGGGDREEEEEAFAALPSPRVLATHLPYHLLPERITAESSGCRVVYVCRDSKDAFVSAWVFTKKTAAAKAAAGEAPPPPPYPLESAFELFCDGRSVGGPQWLHVLGYWEASLRRPDRVLFLQYEDMLRDPVSSVRKLAEFLRCPFSGEEEAAGAVGAVVELCSLGSLQGSKGNRSGKTKDMSIDNGLFFRKGEAGDWRNHLSPEMAARLDQIVGEALQGSGLTLGGVAGAARDDDDDSA

SEQ ID NO: 984 - DNA, 1225 bp, Zea mays
  misc_feature: Ceres Clone ID no. 1556612
  misc_feature: Encodes the peptide sequence at SEQ ID NO. 985
ctgtcagtcagtcggtggcagagacgagcaccttctccagtttttttctcagttctcactccatggccgccgcggcctgcaacccagtggctccttccgggcctgtgccgttcaaggacgtcgacgacggcagtgttccagagcacactcccaaggaggagttcggcgacctcgtggccgcgctgccgagcaggcagcagtccatcctggagctgcgcctgtaccagggcttctggctgccggagcactgggtgccggggaccatcgtgttccagcgccgcttcacgccgcgccccgacgacgtgatcctcgcgagctaccccaagtgcggcaccacgtggctgaaggcgctggccttcgccacggcggcgcgtacggcgtacccgcccggtggcgccaggcacccgctccgacggctcaacccgcacgactgcgtcccgttcatcgacgagatcttcgccagcggggaggaggcgaagctcgaggccctcccgtcgccgaggctgatgaacacgcacctgccctacgccctgctcccggcgcccgtcaccgccaccgccaccgggtgcagggtcgcgtacgtgtgcagggaccccaaggacatggtggtctcgctctggcacttcctccggcgcgccaagccggacctcttgttcgccgacacgttcgagtccgtctgcgacggcaccgtggtggtcggcccggtctgggaccacgtcctctcctactggcgtgcgagcgtggcggccccggacagggcgctcttcctcaggtacgaggacatgctgcgggaccccggcggcaacgtgcggcggctcgccgagttcatgggccgcccgttctcggccgccgaggaggccgccggcgacgtcgcggccgtcgtggagctctgcagcttcgacgagatgaaagggctggaggtgaacaggcctggtagcggcaccgcggggaggtaccgccccatgccgcgcgacgccttcttccggaagggtgtcgccggggactgggcgaaccacatgacgccggagatggcggcgcggctggacgggatcttccgtgaaaagctccaagggacggggcttatcttctcataatgcaaatgtgtatacggctcttgatttgcgtggtcatctcttctgatcttttccgtggtgtcttgtgtttacacgagatatgttagatccaaaataagtagtgatgatttaatatatacatcatatgcatc

SEQ ID NO: 985 - protein, 343 aa, Zea mays
  misc_feature: Ceres Clone ID no. 1556612
  misc_feature (1)..(343): Bit score of 360.0 for hmm based on sequences of FIGURE 4.
  misc_feature (78)..(339): Pfam Name: Sulfotransfer_1 Pfam Description: Sulfotransferase domain
  misc_feature: Functional Homolog Of SEQ ID NO. 590
MAAAACNPVAPSGPVPFKDVDDGSVPEHTPKEEFGDLVAALPSRQQSILELRLYQGFWLPEHWVPGTIVFQRRFTPRPDDVILASYPKCGTTWLKALAFATAARTAYPPGGARHPLRRLNPHDCVPFIDEIFASGEEAKLEALPSPRLMNTHLPYALLPAPVTATATGCRVAYVCRDPKDMVVSLWHFLRRAKPDLLFADTFESVCDGTVVVGPVWDHVLSYWRASVAAPDRALFLRYEDMLRDPGGNVRRLAEFMGRPFSAAEEAAGDVAAVVELCSFDEMKGLEVNRPGSGTAGRYRPMPRDAFFRKGVAGDWANHMTPEMAARLDGIFREKLQGTGLIFS

SEQ ID NO: 986 - DNA, 1320 bp, Triticum aestivum
  misc_feature: Ceres Clone ID no. 1064128
  misc_feature: Encodes the peptide sequence at SEQ ID NO. 987
atttacgattagcctagcgactcggcatggctactgtcttcccccgtgacgccggcgtctccacgccggaagccgacgaggctaagaaaatctacgatgaagcacggcgagtggtgtccacctacgagactgttcccagtcccagcggaaccctgcaggattactgccgccaccccagcggctggtgcataaccctgccgatcatggtgagctccatggtcgcagagcagcactttgaggcgcgtggcaccgacgtgctccttgttacgatgcccaagtccgggactacctggatcaaggccctcctctatgctgcggcccaccgcactgacgacacatcatcgtccatactccggcagctcgcctcccacaactcccaccagctcgttcctttcctcgaggcccaggtctacaccaaggaccagattccagacctgagctcgcttcccgcgccacggctcttcgccacgcacatcccggctgagtcgctgccaccctccgttgtggcgtccggctgcaaggtggtgtacttgtgccgggaccccaaggactgcttcgtgtctctctggcactttatgaacaagttcaccccatgggacatcgacgaggcacacggccggttctgcgagggtgtctcgttgtatgggccattttgggagcacgtgctgagctactggcgttggcacgtcgaccgaccgggtcaggtgctcttcctgacttacgaggagctcagcgccgacccgctcggccaactgaggcgcctagccgagttcattgggcgccccttcacgccgggggagcaggaggcgggagtggacagggagattgcggaggcatgtgccatgaaaagcatggtcaaccaggaggtgaaccagtccaggacgaccgaaatcgttgagatgccgattcccaacgggatcttcttccggcgaggcgtggtcggagactggaccaactacctcacgccggagatggcaggaaggatcgatgagattaccaagagcaagtttgaaggatccggcctcatgctgccgaaaacaatctcggaaatctcaaagatctagcatccctccgtcgtgtttgatgtttgaaatcgttcaccttttttttctcttgttgtaaactgcaccctgctggcactggcttggctgaataaaaaaagcttgcattgttcttgttgatcaaacgaaataccagctggcgagttgttgatgttacggaaaaggcctgcttagtcttaggtatttttcttatcggtttaattgtgatcaaatgtgtttgtactctgcttaattattaataaaaatgattgtatgcacc

SEQ ID NO: 987 - protein, 345 aa, Triticum aestivum
  misc_feature: Ceres Clone ID no. 1064128
  misc_feature (1)..(345): Bit score of 352.5 for hmm based on sequences of FIGURE 4.
  misc_feature (74)..(332): Pfam Name: Sulfotransfer_1 Pfam Description: Sulfotransferase domain
  misc_feature: Functional Homolog Of SEQ ID NO. 590
MATVFPRDAGVSTPEADEAKKIYDEARRVVSTYETVPSPSGTLQDYCRHPSGWCITLPIMVSSMVAEQHFEARGTDVLLVTMPKSGTTWIKALLYAAAHRTDDTSSSILRQLASHNSHQLVPFLEAQVYTKDQIPDLSSLPAPRLFATHIPAESLPPSVVASGCKVVYLCRDPKDCFVSLWHFMNKFTPWDIDEAHGRFCEGVSLYGPFWEHVLSYWRWHVDRPGQVLFLTYEELSADPLGQLRRLAEFIGRPFTPGEQEAGVDREIAEACAMKSMVNQEVNQSRTTEIVEMPIPNGIFFRRGVVGDWTNYLTPEMAGRIDEITKSKFEGSGLMLPKTISEISKI

SEQ ID NO: 988 - protein, 171 aa, Oryza sativa subsp. indica
  misc_feature: Public GI ID no.35187687
  misc_feature: Bit score of 382.2 for HMM based on sequences of FIGURE 7.
  misc_feature (112)..(152): Pfam Name: zf-AN1 Pfam Description: AN1-like Zinc finger
  misc_feature (14)..(38): Pfam Name: zf-A20 Pfam Description: A20-like zinc finger
  misc_feature: Functional Homolog Of Ceres SEEDLINE ID no. ME04477 at SEQ ID NO. 742
MEHKETGCQQPKGPILCINNCGFFGSAATMNMCSKCHKEMIMKQEQAKLAASSIDSIVNGGDSGKEPIIAGHAEVAVAQVEVKTLVAQPAEIAGPSEGVTVNPKGREGPNRCSTCRKRVGLTGFNCRCGNLYCAMHRYSDKHDCQFDYRTAARDAIAKANPVVKAEKLDKI

SEQ ID NO: 989 - protein, 171 aa, Oryza sativa subsp. indica
  misc_feature: Public GI ID no.125556051
  misc_feature: Bit score of 318.6 for HMM based on sequences of FIGURE 7.
  misc_feature (112)..(152): Pfam Name: zf-AN1 Pfam Description: AN1-like Zinc finger
  misc_feature (20)..(38): Pfam Name: zf-A20 Pfam Description: A20-like zinc finger
  misc_feature: Functional Homolog Of Ceres SEEDLINE ID no. ME04477 at SEQ ID NO. 742
  misc_feature (3)..(3): Xaa is any aa, unknown, or other
MEXQGDWMPAARRPDPLHHNCGFFGSAATMNMCSKCHKEMIMKQEQAKLAASSIDSIVNGGDSGKEPIIAGHAEVAVAQVEVKTLVAQPAEIAGPSEGVTVNPKGREGPNRCSTCRKRVGLTGFNCRCGNLYCATHRYSDKHDCQFDYRTAARDAIAKANPVVKAEKLDKI

SEQ ID NO: 990 - protein, 223 aa, Oryza sativa subsp. indica
  misc_feature: Public GI ID no.125561658
  misc_feature: Bit score of 386.5 for HMM based on sequences of FIGURE 7.
  misc_feature (164)..(204): Pfam Name: zf-AN1 Pfam Description: AN1-like Zinc finger
  misc_feature (77)..(101): Pfam Name: zf-A20 Pfam Description: A20-like zinc finger
  misc_feature: Functional Homolog Of Ceres SEEDLINE ID no. ME04477 at SEQ ID NO. 742
MEEQQAAAAGGGGGGGGASMCANGCGFFGSEATKKLCSKCYRDQLKAAPSSPPAAPDLVANEEEEASTAAAAADEQLALCSSGCGFFGSKETNNMCSKCYRDHLKATSPLFSSSSSPATASTTDITVPIAPATTAPTPSLKGKEEEATAAASSSAAAAAKPNRCVECRKKVGLLGFECRCGGTFCSTHRHADKHACTFDFKKSDREKIAKENPLIVAPKITKF

SEQ ID NO: 991 - protein, 171 aa, Oryza sativa subsp. japonica
  misc_feature: Public GI ID no.115468934
  misc_feature: Bit score of 385.4 for HMM based on sequences of FIGURE 7.
  misc_feature (112)..(152): Pfam Name: zf-AN1 Pfam Description: AN1-like Zinc finger
  misc_feature (14)..(38): Pfam Name: zf-A20 Pfam Description: A20-like zinc finger
  misc_feature: Functional Homolog Of Ceres SEEDLINE ID no. ME04477 at SEQ ID NO. 742
MEHKETGCQQPEGPILCINNCGFFGSAATMNMCSKCHKEMIMKQEQAKLAASSIDSIVNGGDSGKEPIIAGHAEVAVAQVEVKTLVAQPAEIAGPSEGVTVNPKGREGPNRCSTCRKRVGLTGFNCRCGNLYCAMHRYSDKHDCQFDYRTAARDAIAKANPVVKAEKLDKI

SEQ ID NO: 992 - protein, 161 aa, Oryza sativa subsp. japonica
  misc_feature: Public GI ID no.115470773
  misc_feature: Bit score of 309.6 for HMM based on sequences of FIGURE 7.
  misc_feature (102)..(142): Pfam Name: zf-AN1 Pfam Description: AN1-like Zinc finger
  misc_feature (20)..(44): Pfam Name: zf-A20 Pfam Description: A20-like zinc finger
  misc_feature: Functional Homolog Of Ceres SEEDLINE ID no. ME04477 at SEQ ID NO. 742
MAQESWKNESEETVHTPEAPILCVNNCGFFGSSMTNNMCSKCYRDFVKVTTMAAPVVEKKAFTPASSSKTPLEPAKPDEVPAAAVEDKQAAQEPPKPPSNRCLSCRKKVGLTGFQCRCGGTFCSTHRYTEAHDCTFDYKKAGRDQIAKQNPVVIAEKINKI

SEQ ID NO: 993 - protein, 173 aa, Oryza sativa subsp. japonica
  misc_feature: Public GI ID no.115444813
  misc_feature: Bit score of 352.9 for HMM based on sequences of FIGURE 7.
  misc_feature (114)..(154): Pfam Name: zf-AN1 Pfam Description: AN1-like Zinc finger
  misc_feature (14)..(38): Pfam Name: zf-A20 Pfam Description: A20-like zinc finger
  misc_feature: Functional Homolog Of Ceres SEEDLINE ID no. ME04477 at SEQ ID NO. 742
MEHKEAGCQQPEGPILCINNCGFFGSAATMNMCSKCHKEMIMKEEQAKLAASSIDSIVNGCDGGKEHIVAASGSTAVAVAQVEAKTLVVQPTDVAGTSEEVAVVPKVKEGPNRCATCRKRVGLTGFNCRCGNMYCALHRYSDKHECQFDYRTAARDAIAKANPVVKAEKLDKI

SEQ ID NO: 994 - DNA, 954 bp, Solanum lycopersicum
  misc_feature: Ceres Annot ID no. 8458774
  misc_feature: Encodes the peptide sequence at SEQ ID NO. 995
atgagtgcatcaccaattgtgaataatgaagaaatagagagaattatagagcaactgcccaaaattgattatttttggaataattatcaactttatcagtgggaagggttttggtctactcttatcattttaaaggcagccatggtcttcaaagcaaccttcaaatcaaaaccaaatgatgttctcttggcatcttccatgaaaacaggttcaacatggctcaaggccatatgtgtatccatcatgcaagctggtaataaagaggaagacgaagaagatcttttagttaaggataatcctcatttttatgttccaacaatagaggccatggattattattcaaaaactctaactcatgatctatacacaatgccctctccaagattatttcacacacatttaccttatagggttttgccagattcaattaaaaattcggataattgcaagattatatacataacaagaaatcctaaagatactttgatttctatgtggcatttcttcaacaatcgtaagcgtttagaagatctcactcctttagaagaagttgtggagaacttttgcaaaggggttcatctatatggacccttttttgaacatgttcttgaatattgggaagaaagcaaaaaaaagcctcaaaagatattattcttgaagtatgaagacttgaagatagaccctaagaaagaggtggcaaagatagccttgtttcttggaaagccttttggtaatgaagaggatttggagatagttttgaacaagtgtagcttggagaggcttaagaatttggaggttaataagagtggatcaatctactcttctgtccacaatagtgcattttttagaaaaggaattgttggggattggaagaattacatgaagcttgaaatggaagagcaacttgacaagattaccaaattgaagcttcaagggagtgaccttgaactttga

SEQ ID NO: 995 - protein, 317 aa, Solanum lycopersicum
  misc_feature: Ceres Annot ID no. 8458774
  misc_feature (1)..(317): Bit score of 240.1 for hmm based on sequences of FIGURE 4.
  misc_feature (58)..(314): Pfam Name: Sulfotransfer_1 Pfam Description: Sulfotransferase domain
  misc_feature: Functional Homolog Of SEQ ID NO. 590
MSASPIVNNEEIERIIEQLPKIDYFWNNYQLYQWEGFWSTLIILKAAMVFKATFKSKPNDVLLASSMKTGSTWLKAICVSIMQAGNKEEDEEDLLVKDNPHFYVPTIEAMDYYSKTLTHDLYTMPSPRLFHTHLPYRVLPDSIKNSDNCKIIYITRNPKDTLISMWHFFNNRKRLEDLTPLEEVVENFCKGVHLYGPFFEHVLEYWEESKKKPQKILFLKYEDLKIDPKKEVAKIALFLGKPFGNEEDLEIVLNKCSLERLKNLEVNKSGSIYSSVHNSAFFRKGIVGDWKNYMKLEMEEQLDKITKLKLQGSDLEL

SEQ ID NO: 996 - DNA, 1011 bp, Sorghum bicolor
  misc_feature: Ceres Annot ID no. 8681290
  misc_feature: Encodes the peptide sequence at SEQ ID NO. 997
atggtcgccggcgagaatggatgcgcaaacgccttctccaagtatgaggaattggcgtcgtccctccctgcatcccagaagggtatcgggagctccccgtaccggaagcacgaaggcttctggtacccggagcaccagctggcgccgacgctggcgatgcgggacacgttcgtcgcccgcccgaccgacatcatcctcgccaccattcccaagtccggcacgacgtggcttaaggccctcgtctactgtgtcgtccaccgcggccaccacgcgccggccgacgagcgccacccactcctcgtctccagcccgcacgacgtggtcccgttcctgcactccatctacgagaaccaccgctccgcgtcgcccgtcccggtcctcgaagagatgccgtcgccgcgtgtcctggccgtgcacgcgccgttcacggccctgccgccatcggtgcgggagtccgcgtgccgcgtcgtctatctgtgccgagaccccaaggacacttttgtctcgctccgtcactacgtcgacaagatcaagcccgagggatccgccatgacgccgttcgccgaggcgttcgacctgttctgcgacggcgtgtcaccgtttgggccggtctgggacaacatggccgagtactggaagaagagcatggcgcggccggaggaggtggtgttcctccggtacgaggacctgaaggaggacactgtggggaacgtgaggcgcctagcggcgttcctcggctgcccattcaccgacgaggaggcagagagaggcgtccctgaggcgattgtgacgctgtgcagtatggacaagatgaggagcgtcaaggccaaccgggatgggatgcactggaacggccgttcacgattcaagaactcggccttctttcgaaagggggaggtcggtgactggaaggcgcacatgacgctggatatggcgaggagactggatgacatcgtggaggaaaaactgcgaggaataggatctgggctctccatgatcggccagccatga

SEQ ID NO: 997 - protein, 336 aa, Sorghum bicolor
  misc_feature: Ceres Annot ID no. 8681290
  misc_feature (1)..(336): Bit score of 402.2 for hmm based on sequences of FIGURE 4.
  misc_feature (61)..(327): Pfam Name: Sulfotransfer_1 Pfam Description: Sulfotransferase domain
  misc_feature: Functional Homolog Of SEQ ID NO. 590
MVAGENGCANAFSKYEELASSLPASQKGIGSSPYRKHEGFWYPEHQLAPTLAMRDTFVARPTDIILATIPKSGTTWLKALVYCVVHRGHHAPADERHPLLVSSPHDVVPFLHSIYENHRSASPVPVLEEMPSPRVLAVHAPFTALPPSVRESACRVVYLCRDPKDTFVSLRHYVDKIKPEGSAMTPFAEAFDLFCDGVSPFGPVWDNMAEYWKKSMARPEEVVFLRYEDLKEDTVGNVRRLAAFLGCPFTDEEAERGVPEAIVTLCSMDKMRSVKANRDGMHWNGRSRFKNSAFFRKGEVGDWKAHMTLDMARRLDDIVEEKLRGIGSGLSMIGQP

SEQ ID NO: 998 - protein, 218 aa, Chlamydomonas reinhardtii
  misc_feature: Public GI ID no. 159468075
  misc_feature (1)..(218): Bit score of 139.6 for hmm based on sequences of FIGURE 13.
  misc_feature (123)..(211): Pfam Name: Synaptobrevin Pfam Description: Synaptobrevin
  misc_feature: Functional Homolog Of SEQ ID NO. 160
MPLIYSSVSQGTVTLAEYAAFSGNFGAVAKDYLEKAGKNEGKFTFNVDGHTFNFLNRGGFTYLVVADEAYGRAIPSAFLDKMASEFAMKFADKAAGAKEGGLNGSFGKQLKSMMEHATQYPEEYSKVASVQKKVDEVKGIMTENIEKVLARGEKLELLTDKTENLMNEADRFQRTGRTLRRKMWWQNCKMKIVVALAVILLAVVIFLLVCFSGGNCLK

SEQ ID NO: 999 - protein, 170 aa, Chrysanthemum x morifolium
  misc_feature: Public GI ID no.112819496
  misc_feature: Bit score of 156.0 for HMM based on sequences of FIGURE 7.
  misc_feature (111)..(151): Pfam Name: zf-AN1 Pfam Description: AN1-like Zinc finger
  misc_feature (19)..(43): Pfam Name: zf-A20 Pfam Description: A20-like zinc finger
  misc_feature: Functional Homolog Of Ceres SEEDLINE ID no. ME04477 at SEQ ID NO. 742
MAQREQERTQEARRKLRAPENHAVRQQLADFPGNPATQKPLPELLLGGHGRTTSSAGLSLPSPVLDKRSRQAVRRRWLSLRLLSHRLWRRWPPRSRRRRRRSAKTSAVNRCSRCRKRVGLTGFRCRCGHLFCGEHRYSDRHGCSYDYKSAARDAIARDNPVVRAAKIVRF

SEQ ID NO: 1000 - protein, 159 aa, Aeluropus littoralis
  misc_feature: Public GI ID no.118424243
  misc_feature: Bit score of 344.8 for HMM based on sequences of FIGURE 7.
  misc_feature (100)..(140): Pfam Name: zf-AN1 Pfam Description: AN1-like Zinc finger
  misc_feature (16)..(40): Pfam Name: zf-A20 Pfam Description: A20-like zinc finger
  misc_feature: Functional Homolog Of Ceres SEEDLINE ID no. ME04477 at SEQ ID NO. 742
MAQESWKQESHAPEAPILCINNCGFFGSSMTNNMCSKCYRDFVKLMEMDAPVVDKKLITTASSSTVPFETAKQDDTVPDAAAMDDKQPAQEPPKPPSNRCSTCRKKVGLTGFQCRCGGTFCSLHRYTDSHECTFDYKKVAREQIAKQNPVVIAEKINKI

SEQ ID NO: 1001 - protein, 222 aa, Picea sitchensis
  misc_feature: Public GI ID no. 116781485
  misc_feature (1)..(222): Bit score of 171.5 for hmm based on sequences of FIGURE 13.
  misc_feature (127)..(215): Pfam Name: Synaptobrevin Pfam Description: Synaptobrevin
  misc_feature: Functional Homolog Of SEQ ID NO. 160
MGQQSLIYSFVARGTVVLAEYTEFKGNFTTIAAQCLQKLPASNNKFTYNCDNHTFNYLVEDGFAYCVVADESVGRQVPMAFLERVKEDFKRRYGGGRADTAVGNSLNRDFGSKLKEHMQYCVDHPEEISKLAKVKAQVSEVKGVMMENIEKVLDRGEKIELLVDKTENLRFQAQDFQKQGTQLRRKMWFQNMKVKLIVLGIVVALILIIVLSVCHGFNCSKK

SEQ ID NO: 1002 - DNA, 823 bp, Gossypium hirsutum
  misc_feature: Ceres Clone ID no. 100034521
  misc_feature: Encodes the peptide sequence at SEQ ID NO. 1003
gaataagcaaggaaggaaggaagttcattcttaggtaggaggagaagagcagctagcttgaaaagagccgctgtctttttgatatatcagccaaggttttgaatttttagatggcgatactatacgcgctggttgcgcgtggatcggtggtgctggcggagtttacggcggcgtctacgaacgctagcgcgattgccaggcagattctagagaaaatacctggagaaaacgactctcacgtttcgtattcacaagatcggtacatcttccacgtcaaacgcaccgatggactcaccgttctttgtatggctgacgaaagtgccggaaggcgcattccttttgcatttcttgaagacattcatcagagatttgtgaggacttatggccgagctgtcttttcagcccttccttatggcatgaatgatgaattttcaagggttttgagtcaacaaatggaatactactcgagtgaccctaatgctgataggataaatcgactaaaaggtgaaatgagtcaggtgagaaacgtaatgatagagaatattgataaagttttggagagaggtgatcggttagaattgctggttgacaaaactgccaacatgcaaggaaatacctttcgcttccgaaagcaaactcgccgttttagaaacacagtatggtggagaaacgtcaaacttacggttgctctaataatcctcctcctaataattatttatgttgtgctggcttttgtttgccgtgggatcacactaccttcatgcctaaaatgaggtcaagagcttgagattcaaactccttcggtacttgccccctttcctct

SEQ ID NO: 1003 - protein, 220 aa, Gossypium hirsutum
  misc_feature: Ceres Clone ID no. 100034521
  misc_feature (1)..(220): Bit score of 658.3 for hmm based on sequences of FIGURE 13.
  misc_feature (123)..(211): Pfam Name: Synaptobrevin Pfam Description: Synaptobrevin
  misc_feature: Functional Homolog Of SEQ ID NO. 160
MAILYALVARGSVVLAEFTAASTNASAIARQILEKIPGENDSHVSYSQDRYIFHVKRTDGLTVLCMADESAGRRIPFAFLEDIHQRFVRTYGRAVFSALPYGMNDEFSRVLSQQMEYYSSDPNADRINRLKGEMSQVRNVMIENIDKVLERGDRLELLVDKTANMQGNTFRFRKQTRRFRNTVWWRNVKLTVALIILLLIIIYVVLAFVCRGITLPSCLK

SEQ ID NO: 1004 - DNA, 1177 bp, Gossypium hirsutum
  misc_feature: Ceres Clone ID no. 1836098
  misc_feature: Encodes the peptide sequence at SEQ ID NO. 1005
accggatcggatctacactgaattaaagaccgaccggttaccttagcttctcatctaagcgaaaaagacgaaggaaagtctccttcctttccatttctttttccttttccaaaaacctccgatacttcctctctccctttcctccgattccatatctctctctctttctgctagggtttgggagttagtgaagaaggggttgttatttcatggggcaacaatcgttgatctacgccttcgtggcacgaggcaccgtggtcttagccgactatacggagttcaccggaaacttcaccggcatagcttctcagtgtctccagaaacttccttcttcaaacaacaagttcacttacaactgcgatggccatacctttaactatctcgtcgataacggcttcacttattgtgtggttgctattgaatccgttggcagacaggttcctatggcatttcttgagagaattaaagaggatttcaccaagagatatggtggaggaaaagctgcagctgcccctgcaaacagcctgagcaaggagtttgggccaaaattaaaggagcatatgcagtattgcattgatcatcctgaggagatcagtaagattgccaaagtgaaagctcaagtttcagaagttaaaggagttatgatggaaaacattgagaaggttctggaccgtggtgagagaattgagcttctggtggatagaacagaaaatcttcgctctcaggcacaagatttccggcagcagggaacccagatgaggagaaagatgtggttacagaacatgaaggtaaagcttatagttctcggaatcttggtcgctttgatcctcatcattgtactgtctgtttgtcacggcttcaaatgttcatgaattgtatgtgcgctctacattccatcggcaactccaagatcagaattattgcaatcacaagtaatgtctaatgctctttctagttagatttccttggttcttttttttttttttggaaatcacatgtgggttatgtataaccatatcagaagactgcatttagaatataagtttgtgtttctggatccttttgatagtagtaagtttgttgaagtgtggaaatatgattaagcatctttggaaaattaatcttgatgaaagtattttcaagttatcctataatcaagccttcggattttttttag

SEQ ID NO: 1005 - protein, 220 aa, Gossypium hirsutum
  misc_feature: Ceres Clone ID no. 1836098
  misc_feature (1)..(220): Bit score of 171.6 for hmm based on sequences of FIGURE 13.
  misc_feature (127)..(215): Pfam Name: Synaptobrevin Pfam Description: Synaptobrevin
  misc_feature: Functional Homolog Of SEQ ID NO. 160
MGQQSLIYAFVARGTVVLADYTEFTGNFTGIASQCLQKLPSSNNKFTYNCDGHTFNYLVDNGFTYCVVAIESVGRQVPMAFLERIKEDFTKRYGGGKAAAAPANSLSKEFGPKLKEHMQYCIDHPEEISKIAKVKAQVSEVKGVMMENIEKVLDRGERIELLVDRTENLRSQAQDFRQQGTQMRRKMWLQNMKVKLIVLGILVALILIIVLSVCHGFKCS

SEQ ID NO: 1006 - DNA, 1018 bp, Gossypium hirsutum
  misc_feature: Ceres Clone ID no. 1895711
  misc_feature: Encodes the peptide sequence at SEQ ID NO. 1007
gacaatgtcacgctaattacttataggctaagaaccaaatccatcccaacttgtttcagatctaggtacttcagaataccctgctgaaatgaatcaaaagggcttgatttatagttttgttgcaaaaggaactgttgttttagctgagcacacatcatattctgggaactttagtaccattgctgttcaatgtttacagaagctgccttcaaatagcagcaagttcacgtattcttgtgacggtcacacatttaacttcctcattgacaatggatttgtgtttctagttgtcgcagatgaatcagttggcaggagtgtgcctttcgtttttcttgaacgggtgctagatgattttaaacaacgatatggtgcaagtataagaaatgagggtccccatcctttagctgatgatgacgatgatgacgacttatttgaggaccaatttagcattgcatataatcttgacagagaatttggaccaaggcttaaggagcacatgcaatattgtatgaaccatccagaagaaatgagtaagctctcgaagttaaaagctcaaatcactgaggtgaaggggattatgatggataacattgagaaggttttggatcgcggggagaagattgaacttctagtggacaaaactgagaacttacaattccaggctgatagcttccagaggcaagggcggcaactgcggcggaggatgtggctgcagaatctgcaaatgaaactgatggtggggggagctattcttgtgttgatcatccttttgtgggtttttgcgtgtggaggtttcaaaggttaacgttgataaccattgcattgcctatgttttcttttatatatacaaaaaataataattctacatttgtttagatgtacaaaatatagttatgctcttgactttgtacatggattgctgttgttatgtagcactaccttgccgtttaagatatgtaatcaaagctttgaattttatacttttttgaagttttctatatgaatgttttttacttgt

SEQ ID NO: 1007 - protein, 238 aa, Gossypium hirsutum
  misc_feature: Ceres Clone ID no. 1895711
  misc_feature (1)..(238): Bit score of 161.2 for hmm based on sequences of FIGURE 13.
  misc_feature (146)..(234): Pfam Name: Synaptobrevin Pfam Description: Synaptobrevin
  misc_feature: Functional Homolog Of SEQ ID NO. 160
MNQKGLIYSFVAKGTVVLAEHTSYSGNFSTIAVQCLQKLPSNSSKFTYSCDGHTFNFLIDNGFVFLVVADESVGRSVPFVFLERVLDDFKQRYGASIRNEGPHPLADDDDDDDLFEDQFSIAYNLDREFGPRLKEHMQYCMNHPEEMSKLSKLKAQITEVKGIMMDNIEKVLDRGEKIELLVDKTENLQFQADSFQRQGRQLRRRMWLQNLQMKLMVGGAILVLIILLWVFACGGFKG

SEQ ID NO: 1008 - DNA, 690 bp, Gossypium hirsutum
  misc_feature: Ceres Clone ID no. 100021678
  misc_feature: Encodes the peptide sequence at SEQ ID NO. 1188
ttgtctctcccaccaactcgcgagataacccagttgatctcagaaaggagaaaggggaaggaaaatgagtctggaaccgtttatttacagcttcgtggctcgaggaacaatgatcttggccgagtacactgagttcactgggaatttcccggccatcgcaactcagtgtttgcaaaaactcccttcttctaataacaagtttacttacaactgtgatcaccatacctttaattttcttgttgaagatggttacgcttattgtgttgttgctaaagattccgttggaaagcaaatctctattgcatttttggaacgtataaaagcggactttaagaaaagatatgggggtggaaaagctgatacagctattgccaaaagtcttaacaaggagttcggaccggttatgaaggagcacatgaaatatattattgaacatgctgaagaaatcgaaaagctattaaaggtgaaggcccaagtttcagaagttaaaagtataatgttggagaatatcgacaaggcgattgatcgaggagaaaacctaaccacacttgctgacaggaccgagaatctacgtgatcaggcccaggcatacaggaaccaagggacgaaaatccgccgtaagatgtggtatcaaaacatgaagataaagttggtggttcttggaatcttggttcttctaatccttgtaat

SEQ ID NO: 1009 - DNA, 582 bp, Sorghum bicolor
  misc_feature: Ceres ANNOT ID no.6063957
  misc_feature: Encodes the peptide sequence at SEQ ID NO 1010
atggcggagaggcaggaggtctctggcggcatggcggcgccgatgtgcgccaacgcctgcgggttcttcgggagtgcggcgaccaagaacctctgctccaagtgctacaaggagcacctgatcaagaccgccaagcaggaagcatccgccgccgtcgtcgtcggcggcgccatcgtcaagtgcgcggccgacgggtgcggtttcttcggatcctcggcgaccaacaacatgtgctccggctgctacatggacttcctcaaagacgctcacgcctcccctgctgtggcggacaaggtcgtcgtactcgctgccgagaagcagccggcggcggcccagatctctgctgcaacgtccagtactgcaccggcggcggtgaaggcggcggcggcgcccaacaggtgcgcgtcgtgccgcaagaaggtggggctgctggggttcccctgccgctgcggcggcacgttctgcgcgctgcaccggtacgcggagaagcacgcctgcgacttcgacttcaaggcggcgggccgggagaagatcgccaagaacaacccgctcgtcgtggcagccaagatcaacaagatctga

SEQ ID NO: 1010 - protein, 193 aa, Sorghum bicolor
  misc_feature: Ceres ANNOT ID no.6063957
  misc_feature: Bit score of 397.1 for HMM based on sequences of FIGURE 7.
  misc_feature (134)..(174): Pfam Name: zf-AN1 Pfam Description: AN1-like Zinc finger
  misc_feature (58)..(83): Pfam Name: zf-A20 Pfam Description: A20-like zinc finger
  misc_feature: Functional Homolog Of Ceres SEEDLINE ID no. ME04477 at SEQ ID NO. 742
MAERQEVSGGMAAPMCANACGFFGSAATKNLCSKCYKEHLIKTAKQEASAAVVVGGAIVKCAADGCGFFGSSATNNMCSGCYMDFLKDAHASPAVADKVVVLAAEKQPAAAQISAATSSTAPAAVKAAAAPNRCASCRKKVGLLGFPCRCGGTFCALHRYAEKHACDFDFKAAGREKIAKNNPLVVAAKINKI

SEQ ID NO: 1011 - DNA, 1113 bp, Sorghum bicolor
  misc_feature: Ceres ANNOT ID no.6017545
  misc_feature: Encodes the peptide sequence at SEQ ID NO 741
atggatatgagcagcagctcacctgttatcaccgatccaatatcaataagcccaccactgttgggaggcttgacatcaaatctgatgccgttttcagtcatgtctggaggttgctccagtcctagtatgaccgccagtaggcgtaaaattgaggaggtccttgttaatggcctgctagatgcaatgaaatcctcgtcaccgcgcaagaagcacaatctcgcctttggacaggataattcactcgacgaagatcctgcttacagtgcatggctgtcaaaatgcccttctgcgttgacctccttcaagcagatagtagccaatgcacaaggcaggcggattgctgtgttcttggattacgacggtaccctgtcaccaatcgttgatgatcccgacaaagcattcatgtcccctgtgatgagagctgctgtcagaaatgttgcaaagtacttccctactgcaattgtcagtggaaggtcccgtaagaaggtgtctgaatttgtgcaactgaaggaactatactacgctgggagtcatgggatggacatagtgacatctgtagcagcacatgctactgaaaagtgcaaacaagccaatctcttccaacctgcttgtgaatttcttcctatgattgacgaggtttccaagtccctcttggaggtcacgagtggaattgaaggtgcaagggttgagaacaacaagttctgtgtatctgtacattaccgcaacgtagcagagaaggactggaaagtggttgcaggcctcgtaaaacaagtattggaggcctttcctcgtctcaaagtaaccaatgggcgaatggttttagaggttcgcccagtgatcgactgggacaagggaaaggccgtcgagtttctgcttcaatcactcggcttaaacgactctgaagatgtgattcctatctacatcggagatgatcgcacggacgaagacgccttcaaggtacttcgagagcgaaaatgtggatatggaatcctagtttcgcaggtgcccaaggacactactgaagccttctactcgctgagagacccatctgaagtgatggggttcctcaattccttggtgagatggaagaagcactcactgcgacgaaactga

SEQ ID NO: 1012 - protein, 269 aa, Oryza sativa subsp. japonica
  misc_feature: Ceres SEEDLINE ID no.ME18396
  misc_feature: Bit score of 703.4 for HMM based on sequences of FIGURE 8.
  misc_feature (17)..(182): Pfam Name: adh_short Pfam Description: short chain dehydrogenase
MATVSAVSAPIRRLEGKVAIITGGASGIGEATARLFSKHGAHLVIADIQDDLGLSLCKHLESASYVHCDVTKEEDVENCVNTAVSKYGKLDIMLNNAGICDEIKTSILDNNKSDFESVISVNLVGPFLGTKHAARVMIAAKRGSIINTASVAGILGGVATHAYTSSKHALIGLMKSTAVELGQFGIRVNCVSPYVVPTPLTKKHANIDEEGVREIYSNLKGVHLVPNDVAEAALYLAGDESKYVSGHNLVLDGGFTNVNIGFSVFGQSE

SEQ ID NO: 1013 - protein, 388 aa, Vitis vinifera
  misc_feature: Public GI ID no.147865685
  misc_feature: Bit score of 666.6 for HMM based on sequences of FIGURE 8.
  misc_feature (130)..(297): Pfam Name: adh_short Pfam Description: short chain dehydrogenase
  misc_feature: Functional Homolog Of Ceres SEEDLINE ID no. ME18396 at SEQ ID NO. 1012
  misc_feature (68)..(68): Xaa is any aa, unknown, or other
  misc_feature (84)..(84): Xaa is any aa, unknown, or other
  misc_feature (144)..(144): Xaa is any aa, unknown, or other
MALWNNVEIEIDLEVACEVVVEMANVEVVVAEEMMKTVDYVHVVEIGNTYQNSGNTLLGIQIHGFTCXSRFGQGEPLLPKVLGXFREGVLSKILILAVRSLGVRDNVEDGSKAMAASSFLSVFTRRLEGKVALITGGASGIGKXTAETFTQHGAKVVIADIQDELGHSVIEALGQTNASYVHCDVTDESQIKAAVDKTAATHGKLDIMFNNAGIVNNYKPRIMDNEKADFERVLSINVTGVFLGMKHAARVMVPAKSGSIISTASVSSNVGAAATHAYCCSKHAVLGLTRNAAIELGQFGIRVNCLSPYALATPLATNFLNLTAEELETAMNATANLKGVTLKAQDVANAALYLASDESRYVSGHNLFIDGGFTVANPSFHLFQYPDS

SEQ ID NO: 1014 - protein, 278 aa, marine gamma proteobacterium HTCC2080
  misc_feature: Public GI ID no.119503368
  misc_feature: Bit score of 285.3 for HMM based on sequences of FIGURE 8.
  misc_feature (8)..(173): Pfam Name: adh_short Pfam Description: short chain dehydrogenase
  misc_feature: Functional Homolog Of Ceres SEEDLINE ID no. ME18396 at SEQ ID NO. 1012
MSKRLEGKVAVITGAASGIGAATAQRFKDEGCLLVLADIQSELGLDFAKQLGDHVYFEACDVSIETDVERVVNRAILEFGKLDIMFNNAGIVGAKGPIDLTPADEWRATTDILINGVFYGVKHAAAIMKKQRSGSIINMSSVAGVMGGLAPHAYTTAKHAVVGLTTSASAELCTHNIRVNAIAPFSMATPMVADAHLKNHLATDEVEKTLAANSPLPGRAGTALDVANAALWLGSDESGYTSGLTLTTDAGVTTGSMVRRPNYEDYVPMQREAGSQGL

SEQ ID NO: 1015 - protein, 282 aa, Thermobifida fusca YX
  misc_feature: Public GI ID no.72161874
  misc_feature: Bit score of 281.5 for HMM based on sequences of FIGURE 8.
  misc_feature (8)..(173): Pfam Name: adh_short Pfam Description: short chain dehydrogenase
  misc_feature: Functional Homolog Of Ceres SEEDLINE ID no. ME18396 at SEQ ID NO. 1012
MTQRLRGRVAAITGGASGIGEATVRRFHTEGASVVIADIQAEAGRRLADELGDRAVFVRTDVSEEADVAALVDTAVDRFGQLDIMVNNAGIMGALGPIDATRMSDADLTIAVNLRGVICGMKHAARVMKPRRSGVIISTSSPAGVLGGIGPHIYSAVKVGIIGLSNSVAAELRQHGIRVNTIIPGSVVSPMTAGIVVDDAHNLAGAQEVLGRTALLGRPIQPADVAAGILYLASDDAAFVTGAVLPVDAGLTGASWPSPYTSGRYAKPVALLEAGRRIGGEE

SEQ ID NO: 1016 - protein, 277 aa, Burkholderia fungorum LB400
  misc_feature: Public GI ID no.91780661
  misc_feature: Bit score of 242.2 for HMM based on sequences of FIGURE 8.
  misc_feature (8)..(172): Pfam Name: adh_short Pfam Description: short chain dehydrogenase
  misc_feature: Functional Homolog Of Ceres SEEDLINE ID no. ME18396 at SEQ ID NO. 1012
MSERLKDRVALVTGAASGIGAATARLMAQEGAFVVLADVDEHAGQALARELRDATFAYTDVSVEAQVAAAVDEALRLHGRLDCMVNNAGFVGAYGSILETSAAAWHATLGVLLDGVFYGIKHAARAMVKQGSGCILSVASTAGVMGGLGPHAYTSAKHAVIGLTRSAASELAPRGVRVNAVAPGTTVTEMMVQGRGSRQAAIDAATRASPLGTPLMPQEIAAALVYLASDDARHVNAHTLVVDSGVTVAGASGGAVFHNRPAGFMGRMPGGANADAR

SEQ ID NO: 1017 - DNA, 1072 bp, Zea mays
  misc_feature: Ceres CLONE ID no.287430
  misc_feature: Encodes the peptide sequence at SEQ ID NO 1018
agattttgacaacgccttcccaacttgctcgctcccgcaacgacagcgcgcacttggattcggcgaccaccggagcgcggaggaggcacaggcgccgatctagagacgatggccgccgcgggctcctcgccgtccttctcctcctcgagtaagcggctggaagggaaggtggccctcgtcaccggtggcgccaccggcatcggcgaggccatcgttcgcctcttcatggagcacggcgccaaggtctgcatcgcggacatccaggatgaggccgggcagcagctgcgcgacgccctgggaggtgacgcgcagggcgccatgttcgtccactgcgacgtgacgtcggaggaggacgtgagccgcgccgtggacgctgcggcggagcggttcggcgcgctggacgtgatggtgaataacgccggcgtgacgggcaccaaggtgacggacatccgcaccgtggacttcgcggaggcgcgcagggtgctcgacgtcaacgtgcacggcgtgttcctggtgatgaagcacgcggcgcgcgctatgatcccgcggaagcggggctccatcgtgtcgctggccagcgtggccagcgccatcggcgggacgggcccgcacgtctacacggcgtccaagcacgccgtggtcgggctcaccaagagcgtcgccgcggagctcggccgtcatggggtgcgcgtcaactgcgtgtccccctatgccgtgcccacggcgctgtcgatgccgcacctgccccagggcgcgcgcgcagatgacgcgctcaaggacttcctggcctttgtcggcggcgaggccaacctcaagggcgtcgacgccatgcccgaggacgtcgcccaggcggtgctctacctggccagcgacgaggcgaggtacgtcagcgcggtcaacctcatggtggacggaggcttcacagccgtaaacaataacctcagggcgtttgaggattagttgaggcatttatgccagctctgggattgggagggagtattaccactatttcttctgctgttgtgacaagtgagtgcaagactaataaactgcagcatgttcatgtagccag

SEQ ID NO: 1018 - protein, 283 aa, Zea mays
  misc_feature: Ceres CLONE ID no.287430
  misc_feature: Bit score of 701.2 for HMM based on sequences of FIGURE 8.
  misc_feature (20)..(189): Pfam Name: adh_short Pfam Description: short chain dehydrogenase
  misc_feature: Functional Homolog Of Ceres SEEDLINE ID no. ME18396 at SEQ ID NO. 1012
MAAAGSSPSFSSSSKRLEGKVALVTGGATGIGEAIVRLFMEHGAKVCIADIQDEAGQQLRDALGGDAQGAMFVHCDVTSEEDVSRAVDAAAERFGALDVMVNNAGVTGTKVTDIRTVDFAEARRVLDVNVHGVFLVMKHAARAMIPRKRGSIVSLASVASAIGGTGPHVYTASKHAVVGLTKSVAAELGRHGVRVNCVSPYAVPTALSMPHLPQGARADDALKDFLAFVGGEANLKGVDAMPEDVAQAVLYLASDEARYVSAVNLMVDGGFTAVNNNLRAFED

SEQ ID NO: 1019 - DNA, 837 bp, Oryza sativa subsp. indica
  misc_feature: Ceres ANNOT ID no.451889
  misc_feature: Encodes the peptide sequence at SEQ ID NO 1020
atgtccgccgccgccgcatcctcccccgctccccggttggaaagcaaggttgcgctggttaccggtggtgcttcaggtattggtgaagcaattgttcgcctctttagagagcatggtgcaaaggtatgtattgcagatatccaagatgaagcaggtcagaagctccgggactcccttggaggtgaccaagatgtcttatttgtccactgcgatgtttcggtggaagaggatgtagcccgagcggtcgatgcaacagctgaaaagtttggtactcttgacatcatggtcaacaatgctggctttacaggccagaaaatcacagatatccgaaacatcgacttttctgaagtcaggaaggtaatcgacatcaatttagttggtgtattccacgggatgaaacacgcagcccgcatcatgatccccaataagaaggggtccatcatctcattgggaagtgtttctagtgtcattggagggttgggacctcattcatacacagcaaccaagcatgctgtggtgggtctaaccaagaatgtagctggggaattggggaagcatgggatacgcgtgaactgcgtatctccctatgcagtgcccacggctctctccatgccgtatctgccccagggcgagcgcaaggatgatgccctgaaagactttttcgcctttgttggtggtgaagcaaacctgaaaggtgtggatctgctacctaaggatgttgctcaagcagtgctctacttggcaagcgatgaagcgaggtacatcagcgcgctcaacctcatggtggatggtggctttacctctgtgaatcacaatttgagagcatttgaagattaa

SEQ ID NO: 1020 - protein, 278 aa, Oryza sativa subsp. indica
  misc_feature: Ceres ANNOT ID no.451889
  misc_feature: Bit score of 705.3 for HMM based on sequences of FIGURE 8.
  misc_feature (16)..(184): Pfam Name: adh_short Pfam Description: short chain dehydrogenase
  misc_feature: Functional Homolog Of Ceres SEEDLINE ID no. ME18396 at SEQ ID NO. 1012
MSAAAASSPAPRLESKVALVTGGASGIGEAIVRLFREHGAKVCIADIQDEAGQKLRDSLGGDQDVLFVHCDVSVEEDVARAVDATAEKFGTLDIMVNNAGFTGQKITDIRNIDFSEVRKVIDINLVGVFHGMKHAARIMIPNKKGSIISLGSVSSVIGGLGPHSYTATKHAVVGLTKNVAGELGKHGIRVNCVSPYAVPTALSMPYLPQGERKDDALKDFFAFVGGEANLKGVDLLPKDVAQAVLYLASDEARYISALNLMVDGGFTSVNHNLRAFED

SEQ ID NO: 1021 - DNA, 858 bp, Arabidopsis thaliana
  misc_feature: Ceres ANNOT ID no.835908
  misc_feature: Encodes the peptide sequence at SEQ ID NO 1022
atgtcaacgaacactgaatcttcttcttattcttctcttcctagtcaaaggcttttgggtaaagtggcattgatcactggaggagccacagggataggtgagagcattgttcgtctgttccacaagcacggtgccaaagtctgcattgttgatctgcaagatgatctcggaggtgaggtgtgtaaaagtctgcttcgtggtgagtccaaggagacggcttttttcatccatggcgatgttagagtggaagatgacattagcaatgcggttgactttgcagtcaaaaattttgggacgcttgatatacttatcaacaatgcaggattatgtggagcaccgtgccctgatattcgtaattatagtttgagtgagttcgagatgacctttgatgtgaatgtgaaaggagcttttctaagcatgaaacatgcagctcgtgtaatgataccggagaagaaagggtcgatagtttccttatgtagtgtgggaggtgttgtgggaggcgttggtccacattcttatgttggttccaagcatgctgttctaggcttgactaggagtgttgcagcggagcttggacagcacgggatacgtgtgaactgtgtttcgccttacgcggttgcaactaaactcgctttggctcatttgccggaggaagaaagaacggaggatgcatttgttggtttcaggaattttgctgctgcaaacgcgaatctaaaaggggtggaactgacggttgatgatgtagcgaacgctgttctgtttttggctagcgatgactcgcggtacataagcggagataatttgatgattgatggaggattcacttgcactaaccactcctttaaagtcttcagatga

SEQ ID NO: 1022 - protein, 285 aa, Arabidopsis thaliana
  misc_feature: Ceres ANNOT ID no.835908
  misc_feature: Bit score of 588.8 for HMM based on sequences of FIGURE 8.
  misc_feature (21)..(192): Pfam Name: adh_short Pfam Description: short chain dehydrogenase
  misc_feature: Functional Homolog Of Ceres SEEDLINE ID no. ME18396 at SEQ ID NO. 1012
MSTNTESSSYSSLPSQRLLGKVALITGGATGIGESIVRLFHKHGAKVCIVDLQDDLGGEVCKSLLRGESKETAFFIHGDVRVEDDISNAVDFAVKNFGTLDILINNAGLCGAPCPDIRNYSLSEFEMTFDVNVKGAFLSMKHAARVMIPEKKGSIVSLCSVGGVVGGVGPHSYVGSKHAVLGLTRSVAAELGQHGIRVNCVSPYAVATKLALAHLPEEERTEDAFVGFRNFAAANANLKGVELTVDDVANAVLFLASDDSRYISGDNLMIDGGFTCTNHSFKVFR

SEQ ID NO: 1023 - protein, 261 aa, Bouteloua hirsuta
  misc_feature: Public GI ID no.38326750
  misc_feature: Bit score of 301.2 for HMM based on sequences of FIGURE 8.
  misc_feature (35)..(204): Pfam Name: adh_short Pfam Description: short chain dehydrogenase
  misc_feature: Functional Homolog Of Ceres SEEDLINE ID no. ME18396 at SEQ ID NO. 1012
MPALDVLPEKPHHGWESNGAAAIAPTPAPRRLDGKVAIVTGGARGIGEAIVRLFARHGARVVIADVDAAAGDALAAALGPQVSCVRCDVSVEDDVRRAVEWAVARHGRLDVLCNNAGVLGRQTRAAKSILSFDAGEFDRVLRVNALGAALGMKHAARAMAPRRAGSIVFVASVAGVLGGLGPHAYTASKHAIVGLTKNAACELGAHGIRVNCVSPFGVATPMLINAWRQGHADAVPSDEEVEKMEEVVRGLATLKGPTLRP

SEQ ID NO: 1024 - DNA, 941 bp, Gossypium hirsutum
  misc_feature: Ceres CLONE ID no.1939396
  misc_feature: Encodes the peptide sequence at SEQ ID NO 1025
aaaagatcagcgtttccacaatgtccaataacaagctagaaggcaaagtagccatcatcaccggtggagcgagcggtatcggcaaagccaccgcctgtctcttcgccaagcacggtgcccgtgtggtgatcgccgacatccaagatgaactaggccagcaggtagccgcatcaatcggttcccaaaagtgcagctacatccactgtgatgttaccgatgaagagcaagtgaaaggcatagtggaatggaccgtccaaaaccatggccaactcgacatcatgtttagcaatgctgggatagtacgttccaacaagggtaccacctccaactccaaccagaacatcctcgacctagacctcgcgcctttcgaccacctgttcgccgtcaacgcccgcggcatggcggcttgcgtcaaacactcggcgcgttccatggttgagaagcgcgtgagagggagcatcatctgcacggccagtgtatgcgccagctgcggcggggaacaccacgtggattactttatgtcgaagcatgcggtgttgggattggtgaggtcggcgagcaagcagcttggggtgcacgggatcagagtaaatagcgtgtcgccgttcgcggtggcgaccccattgatatgtaacctgacgggaatgaaagcgaggaagctgagaagttttacgaggggaggacgattttgaaaggggtagtggtgaaagagaagcacgtggctgacgcggtgttgtttctagcatcggaagattcggaggtggtgagcggacatgacatggtagtggatgctgggtttttgggcaaatagttaaatggttggtcaccggtaggtcggcctaaaatcatgaaatatggtccacgctcctttgtttgttcaataaggacttgcttttatgaaataatttcatatcttttcagaaaaaaaaaaaaaaaaaaaa

SEQ ID NO: 1025 - protein, 223 aa, Gossypium hirsutum
  misc_feature: Ceres CLONE ID no.1939396
  misc_feature: Bit score of 228.5 for HMM based on sequences of FIGURE 8.
  misc_feature (9)..(184): Pfam Name: adh_short Pfam Description: short chain dehydrogenase
  misc_feature: Functional Homolog Of Ceres SEEDLINE ID no. ME18396 at SEQ ID NO. 1012
MSNNKLEGKVAIITGGASGIGKATACLFAKHGARVVIADIQDELGQQVAASIGSQKCSYIHCDVTDEEQVKGIVEWTVQNHGQLDIMFSNAGIVRSNKGTTSNSNQNILDLDLAPFDHLFAVNARGMAACVKHSARSMVEKRVRGSIICTASVCASCGGEHHVDYFMSKHAVLGLVRSASKQLGVHGIRVNSVSPFAVATPLICNLTGMKARKLRSFTRGGRF

SEQ ID NO: 1026 - DNA, 1123 bp, Zea mays
  misc_feature: Ceres CLONE ID no.403637
  misc_feature: Encodes the peptide sequence at SEQ ID NO 1027
atttggcaactcaatgcccagctctcatcaggagctcaacaaagtctgttaggatgctgagagcaacgcacctcgctttcaggagggacaagggtacggctgcgggagccgccttgcgtggcgtcgtcggtggtttctcgacggcgtcagactcccagtcccaaaggctagccggcaaggtcgccgtcatcaccggcgcggccagcggcatcggcagggcgacggccgccgagttcgtccggaacggcgccaaggtcatcctcgcggacgtgcaggacggcgccggccgcgccgtggccgccgagctcggcccggccgcggcctacgcccgctgcgacgtcacggacgaggcccagatcgccgcggcggtggacctcgccgtggcgcgccacggccgcctggacgtgctgtacagcaacgcgggcgcgccgggcgcctcggcgcccgcgccgctgccgtcgctcgacctcgccgacttcgaccgcgtcatggcggtcaacgcgcggtccgcggtggcgtgcctcaagcacgccgcgcgcgtcatggtgccccagggcgccggctgcgtcctgtacacggggagcactacgggtatgctcggcggcctcgccgcgctgccctacagcctgtccaaggccacggtcatctccgtggtgcgggccgccgcggacgagctggcgcggtcgggggtgcgcgtcaacgccatctcgccgcacgccatcgccacgccgctgctgctccgctccctcgccaggctgcacccaggcgtccccgacgagcagctgaagcgcctggtggagactggcatgagcgacctccgtggtgcggtgctgcaggtccaggacgtcgcaagggcggccgtctacctggcctccgacgaggccaagttaccgggcataatctcgtggttgacggtgggttcacggccagcaagcggatcggcacgccggcggcaagctcaaccgctagctgaccattctcctggacaggtcctgcgaataattataaatcaatgtacttggttgatcgtgagttgtgagttgtgaccggattgatatgaaacctagcattctaaagtatcaaccagcgttacattatcagtactaaaaaaaaaaaaaaaaaa

SEQ ID NO: 1027 - protein, 330 aa, Zea mays
  misc_feature: Ceres CLONE ID no.403637
  misc_feature: Bit score of 221.8 for HMM based on sequences of FIGURE 8.
  misc_feature (42)..(209): Pfam Name: adh_short Pfam Description: short chain dehydrogenase
  misc_feature: Functional Homolog Of Ceres SEEDLINE ID no. ME18396 at SEQ ID NO. 1012
MLRATHLAFRRDKGTAAGAALRGVVGGFSTASDSQSQRLAGKVAVITGAASGIGRATAAEFVRNGAKVILADVQDGAGRAVAAELGPAAAYARCDVTDEAQIAAAVDLAVARHGRLDVLYSNAGAPGASAPAPLPSLDLADFDRVMAVNARSAVACLKHAARVMVPQGAGCVLYTGSTTGMLGGLAALPYSLSKATVISVVRAAADELARSGVRVNAISPHAIATPLLLRSLARLHPGVPDEQLKRLVETGMSDLRGAVLQVQDVARAAVYLASDEAKLPGIISWLTVGSRPASGSARRRQAQPLADHSPGQVLRIIINQCTWLIVSCEL

SEQ ID NO: 1028 - protein, 285 aa, Zea luxurians
  misc_feature: Public GI ID no.42539907
  misc_feature: Bit score of 372.1 for HMM based on sequences of FIGURE 8.
  misc_feature (27)..(197): Pfam Name: adh_short Pfam Description: short chain dehydrogenase
  misc_feature: Functional Homolog Of Ceres SEEDLINE ID no. ME18396 at SEQ ID NO. 1012
MSPSHHGWDGNGAAAVPTPMPKRLDGKVAIVTGGARGIGEAIVRLFAKHGARVVIADIDDAAGEALASALGPQVSFVRCDVSVEDDVRRAVDWALSRHGGRLDVYCNNAGVLGRQTRAARSILSFDAAEFDRVLRVNALGAALGMKHAARAMAPRRAGSIVSVASVAAVLGGLGPHAYTASKHAIVGLTKNAACELGAHGVRVNCVSPFGVATPMLINAWRQGHDDATADADRDLDLDVTVPSDQEVEKMEEVVRGLATLKGPTLRPRDIAEAVLFLASDEARYI

SEQ ID NO: 1029 - DNA, 1041 bp, Gossypium hirsutum
  misc_feature: Ceres CLONE ID no.1836494
  misc_feature: Encodes the peptide sequence at SEQ ID NO 1030
atcattgtccatttactctgagtggcaaaatcggctaactctacaatgtccaacaagctagaaggtaaaatagccataatcaccggtggagctagcggcattggagaagccgccgctcatcatttcgctgcccatggtgctcaaatgatcgtgattgctgacatccaagatgaattaggccaaaaggtagtcgaatcgatcggttcccataagtgctcattcatgcactgcgatgttaccgatgaagagcaagtaaagaacttagttcaatcgacggtccaaaactatgggcggcttgatatcatgttcggtaacgctgggatatttagcagctccactcaaaccgtccttgaactggacttagcacagtttgaccgcctcttcaacataaatgtccgtggcatggctgcttgcgtgaaacacgctgcacgagccatggtggaactgaatgtgagaggaagtatcgtttgtacggcgagcgtcgcatctagcaccgctggtgaaatgaacaccgactatttcattacaaagcatgcagtgcttgggttgatgagatcggcaagcaaacagcttggggtgcatgggattagggtaagcagtgtgtctccgtctgctgtgggaaccccgttactctgtcggtacctcgggaaggaggtggaggaagtggagcagacctatgaaccctacactcggttgaaaggggtggtgctgaaaacgaagcatgttgctgatgccgtgctgtttcttgcgtcccaggattctgagcttattaccgggcatgacttggtggtggatgctggttatcatctagtctactagacaccaggtgttcgattatttggcgcagtgagctagggccagccacttgatgtttgattggtgatagctcaaacatggccagcagcctctcaatattatgcaccttcgaatttgattatgttttaatgttttcatataaataaaaggtttttgtattttatacattttaatgcatcatatatagtgatacttctttaattgtaaaaaaaaaaaaaaaaaaaa

SEQ ID NO: 1030 - protein, 257 aa, Gossypium hirsutum
  misc_feature: Ceres CLONE ID no.1836494
  misc_feature: Bit score of 311.4 for HMM based on sequences of FIGURE 8.
  misc_feature (8)..(177): Pfam Name: adh_short Pfam Description: short chain dehydrogenase
  misc_feature: Functional Homolog Of Ceres SEEDLINE ID no. ME18396 at SEQ ID NO. 1012
MSNKLEGKIAIITGGASGIGEAAAHHFAAHGAQMIVIADIQDELGQKVVESIGSHKCSFMHCDVTDEEQVKNLVQSTVQNYGRLDIMFGNAGIFSSSTQTVLELDLAQFDRLFNINVRGMAACVKHAARAMVELNVRGSIVCTASVASSTAGEMNTDYFITKHAVLGLMRSASKQLGVHGIRVSSVSPSAVGTPLLCRYLGKEVEEVEQTYEPYTRLKGVVLKTKHVADAVLFLASQDSELITGHDLVVDAGYHLVY

SEQ ID NO: 1031 - protein, 283 aa, Zea mays subsp. mays
  misc_feature: Public GI ID no.15192945
  misc_feature: Bit score of 360.9 for HMM based on sequences of FIGURE 8.
  misc_feature (27)..(197): Pfam Name: adh_short Pfam Description: short chain dehydrogenase
  misc_feature: Functional Homolog Of Ceres SEEDLINE ID no. ME18396 at SEQ ID NO. 1012
MSPSHHGWDGNGAAAVPTPMPKRLDGKVAIVTGGARGIGEAIVRLFAKHGARVVIADIDDAAGEALASALGPQVSFVRCDVSVEDDVRRAVDWALSRHGGRLDVYCNNAGVLGRQTRAARSILSFDAAEFDRVLRVNALGAALGMKHAARAMAPRRAGSIVSVASVAAVLGGLGPHAYTASKHAIVGLTKNAACELGAHGVRVNCVSPFGVATPMLINAWRQGHDDTTADADRDLDLDVTVPSDQEVEKMEEVVRGLATLKGPTLRPRDIAEAVLFLASDEAR

SEQ ID NO: 1032 - DNA, 541 bp, Parthenium argentatum
  misc_feature: Ceres CLONE ID no.1607947
  misc_feature: Encodes the peptide sequence at SEQ ID NO 1033
  misc_feature (476)..(476): n is a, c, t, g, unknown, or other
  misc_feature (477)..(477): n is a, c, t, g, unknown, or other
  misc_feature (478)..(478): n is a, c, t, g, unknown, or other
atctatatcactctcacccttcaagatacaatgacaactcctacaagaaggctagaaggaaaggtagcgttgattaccggagcagcaagcggtattggagagtgtactgcaaaactctttgctgaacatggtgccaaaataataattgcagacattcgagacaagcttggtcaagcggtttgtgacgccataggcccatcaaactctatatacgtccactgtgacgtaaccaatgaagaacatgtcaagaacgctgtagatattgcgatcaccacttatggaaaacttgatatcatgttcaataatgcagcagtgttaggtcccaacaaaccaccaatcatcgataatgagaaaagtgattttgaacgtgtgctaagtgttattgttaccggtgtctttcttggcatgaagcatgctgctagggttatggtccccgcaaaaagaggggtaataatctcaacagctagtgttgcttnnnatgttggtggattggcgccacatgcctactgttgtgcaaagcatggtgtggtcgggttaacca

SEQ ID NO: 1033 - protein, 170 aa, Parthenium argentatum
  misc_feature: Ceres CLONE ID no.1607947
  misc_feature: Bit score of 254.5 for HMM based on sequences of FIGURE 8.
  misc_feature (11)..(170): Pfam Name: adh_short Pfam Description: short chain dehydrogenase
  misc_feature: Functional Homolog Of Ceres SEEDLINE ID no. ME18396 at SEQ ID NO. 1012
  misc_feature (149)..(149): Xaa is any aa, unknown, or other
  misc_feature (150)..(150): Xaa is any aa, unknown, or other
MTTPTRRLEGKVALITGAASGIGECTAKLFAEHGAKIIIADIRDKLGQAVCDAIGPSNSIYVHCDVTNEEHVKNAVDIAITTYGKLDIMFNNAAVLGPNKPPIIDNEKSDFERVLSVIVTGVFLGMKHAARVMVPAKRGVIISTASVAXXVGGLAPHAYCCAKHGVVGLT

SEQ ID NO: 1034 - DNA, 1136 bp, Arabidopsis thaliana
  misc_feature: Ceres CLONE ID no.115880
  misc_feature: Encodes the peptide sequence at SEQ ID NO 1035
atgctagtatgcttcaggttcaatcaccgccccattagattctctctccctctctaaagaccacacctttatgttccctctatatctatataagacgcaaacacagggaccattctcttcaaagacgagaaattataagttaggaaacgacaaagaccgatctatatatatatctcggagcaatatagctagcacaaacatgtttcagattggaaaaaacgcattattcaagaatgtgagcaagaacttccttatcaagggaatatcctcatcctcatcatctcattcaacttcaaggaagctagaaggtaaagtagcactcatcactggaggagcaagtgggattggcaaagcaacagccggaaaattcatcagtcatggagccaaagttatcattgccgatatccaaccgcagattgggcgagaaaccgagcaagaactcggtcccagttgtgcttacttcccatgcgatgtgaccaaagaatcagacattgctaacgcagttgacttcgctgtctcgctccatacaaagctcgacattatgtacaacaatgctggtattccctgcaaaacgcctcctagtatcgttgatcttgatctcaatgttttcgacaaggtaatcaacacaaatgtccgtggagtcatggcaggaatcaaacatgctgctcgtgtgatgatcccgcgtaactctggatccatcatttgtgcagggagtgtcacggggatgatgggcggtttagcccaacatacttacagcgtctcaaaatccgctgttatcggaattgtaagatcaacagcttcagaactatgcaagcacaggatccgggtcaactgcatttctccttttgcgatcacaacatcattcgtgatggatgagatgcgacagatttaccccggtgttgatgactcaaggctgatccagatagtgcagagtacaggagtgttaaatggagaggtttgtgaaccaaccgatgtagctaatgcagcggtgtatctcgcttccgatgattcaaagtatgtaaatgggcataatctggtggtagatggaggattcacaactgtaaagacgttagatttccctgcacctgaccaagtgaagtaacaaaactcataatatacaaagaaaactgttcttg

SEQ ID NO: 1035 - protein, 343 aa, Arabidopsis thaliana
  misc_feature: Ceres CLONE ID no.115880
  misc_feature: Bit score of 382.7 for HMM based on sequences of FIGURE 8.
  misc_feature (81)..(247): Pfam Name: adh_short Pfam Description: short chain dehydrogenase
  misc_feature: Functional Homolog Of Ceres SEEDLINE ID no. ME18396 at SEQ ID NO. 1012
MFPLYLYKTQTQGPFSSKTRNYKLGNDKDRSIYISRSNIASTNMFQIGKNALFKNVSKNFLIKGISSSSSSHSTSRKLEGKVALITGGASGIGKATAGKFISHGAKVIIADIQPQIGRETEQELGPSCAYFPCDVTKESDIANAVDFAVSLHTKLDIMYNNAGIPCKTPPSIVDLDLNVFDKVINTNVRGVMAGIKHAARVMIPRNSGSIICAGSVTGMMGGLAQHTYSVSKSAVIGIVRSTASELCKHRIRVNCISPFAITTSFVMDEMRQIYPGVDDSRLIQIVQSTGVLNGEVCEPTDVANAAVYLASDDSKYVNGHNLVVDGGFTTVKTLDFPAPDQVK

SEQ ID NO: 1036 - DNA, 1068 bp, Glycine max
  misc_feature: Ceres CLONE ID no.1074009
  misc_feature: Encodes the peptide sequence at SEQ ID NO 1037
ctcgccgagtcacatttgccacgtcgtggagagtataggaactcggcagaccagcaagatgttccgggctatgcaggtcgtcctcaggggggagggccgtcgtgctgcggcggctggcttgaccggccactgcggctactccacggcctcgagctcccagaggttggctggtaaggtggccgttatcaccggcgccgctagcggcatcggcaaggcgacggccgcggagttcgtcaggaacggcgccaaggtcgtgctcgccgacgtccaggacgacctgggccgcgccctggcggccgagctcggcgctgactccgcgtcctacacccgctgcgacgtcacggacgaggcgcaggttgcggcggtggtcgacctcgccgtggcccgccacggcaagctggacatcatgctcaacaacgccggcatcgtgggctccctggcgcggcccgagctgggcgctctcgacctcgccgacttcgacgccgtcatggcgatcaacacccggggcgtcatggccggcgtcaagcacgcaacccgcgtcatggcgccgcgccgcgcgggcagcatcatctgcacggccagcatcgccggcgtgctgggccagctcacgccgcacccgtacagcgtctccaagttcgcggtggtggggctcgtgcgcgccgtagccggggagctggcgcgctcgggcgtgcgcgtcaacgccatctcgcccaactacatcctgacgccgctggtgaagcgcatcctgcaggagtggtacccggaggcgagcggcgaggagcaccggcggatcgtggagagcgacatcaacgagatggaaggcgtggtgctggaggtggaggacatcgccaaggcggctctgtacctggcgtctgacgactccaagtacgtcaacggccacaacctcgtcgtcgacggcgggttcacggtggggaaggcacccaacatgccggcaccggcgcagtgaagggacacaatcggagtcagcgtattgctctaccggaacaaatctgtttatttcttcagcattgcaaaagaaaaccttcgtgatgaaaaaaaaaaaaaaaa

SEQ ID NO: 1037 - protein, 298 aa, Glycine max
  misc_feature: Ceres CLONE ID no.1074009
  misc_feature: Bit score of 355.2 for HMM based on sequences of FIGURE 8.
  misc_feature (35)..(203): Pfam Name: adh_short Pfam Description: short chain dehydrogenase
  misc_feature: Functional Homolog Of Ceres SEEDLINE ID no. ME18396 at SEQ ID NO. 1012
MQVVLRGEGRRAAAAGLTGHCGYSTASSSQRLAGKVAVITGAASGIGKATAAEFVRNGAKVVLADVQDDLGRALAAELGADSASYTRCDVTDEAQVAAVVDLAVARHGKLDIMLNNAGIVGSLARPELGALDLADFDAVMAINTRGVMAGVKHATRVMAPRRAGSIICTASIAGVLGQLTPHPYSVSKFAVVGLVRAVAGELARSGVRVNAISPNYILTPLVKRILQEWYPEASGEEHRRIVESDINEMEGVVLEVEDIAKAALYLASDDSKYVNGHNLVVDGGFTVGKAPNMPAPAQ

SEQ ID NO: 1038 - DNA, 969 bp, Glycine max
  misc_feature: Ceres CLONE ID no.476073
  misc_feature: Encodes the peptide sequence at SEQ ID NO 1039
ttggtcctctctatccatagagcctcacattactgagaagataatatagaatggctgaatcagcaaactcaatccacaacagtggccagaaaaagttagccggcaaagttgccataatcaccggcggagccagcggcatcggcgaagagacggcgcgtctgtttgctcaccatggtgcacgaatggttgtgattgcagacatccaagatgacctgggtatccaagtagcagcatccattggctctcacaggtgcagctatgtccgttgtgacgtgacagacgaagaccaagtcaaaaacctcgtggattccacggtcaacgctcacggccagctggacatcatgttcagcaacgcgggcatcctcagtccctccgaccagacaatcctcgacctcgacttctccgcgtacgaccgtctcctcgccgtgaacgcgcggggcacggcagcgtgcgtgaagcacgcagcgcggtcgatggtggagcggcgcgtgaggggcagcattgtgtgcacggcgagcgtgtcagcgtcgcacggcggcctgcggcgaaccgactacgtgatgtcgaagcacgcggtgaaggggctcatgcgcgcggccagcgcgcagcttggagcgcatggtgttagggtgaactgcgtctcgccgagtgggttgaccacgccgctgacacgtgccgcgcatgccgcgatggagacgaaggagttgcagaagcagtacgcgcagagctctaggttgaaaggtgtctttttgacgccgaagcatgtcgcggatgcggtgctgtttcttgcgtgcggtgactccgagtttgtaaccggacacgatcttgtggtggacggttgttttgacggtgtttagagtgtgtttggttttagttgaaaagcttcaaatgtacgttcaaggataaggagaactaataatttagtgccaacgatctgaaacggtaaaataaacaagtatttagttttag

SEQ ID NO: 1039 - protein, 268 aa, Glycine max
  misc_feature: Ceres CLONE ID no.476073
  misc_feature: Bit score of 327.1 for HMM based on sequences of FIGURE 8.
  misc_feature (19)..(188): Pfam Name: adh_short Pfam Description: short chain dehydrogenase
  misc_feature: Functional Homolog Of Ceres SEEDLINE ID no. ME18396 at SEQ ID NO. 1012
MAESANSIHNSGQKKLAGKVAIITGGASGIGEETARLFAHHGARMVVIADIQDDLGIQVAASIGSHRCSYVRCDVTDEDQVKNLVDSTVNAHGQLDIMFSNAGILSPSDQTILDLDFSAYDRLLAVNARGTAACVKHAARSMVERRVRGSIVCTASVSASHGGLRRTDYVMSKHAVKGLMRAASAQLGAHGVRVNCVSPSGLTTPLTRAAHAAMETKELQKQYAQSSRLKGVFLTPKHVADAVLFLACGDSEFVTGHDLVVDGCFDGV

SEQ ID NO: 1040 - DNA, 1043 bp, Glycine max
  misc_feature: Ceres CLONE ID no.554053
  misc_feature: Encodes the peptide sequence at SEQ ID NO 1041
accataaaatggagccacaacatgtgactgatcagaatatagaaactaaaaaatcatcaacaaaaaggctagctgataaggtggcagttataactggtggtgcaagaggaattggtgcagctgcagctaaactgtttgctgaaaatggagcacatgtggtcattgctgatgtgcttgatgaactaggcaccaccgtggccaagtccattggcggccactacatacactgtgatgtgtcgaaggaagatgatgttgaatcagccataaaccttgcactatcatggaagggccatctagacatcatgctcagcaatgctggaattggaggcccagagggaagaagcatcacaacccttgaaatggaccgagtgaggcacttgttctccatcaatctttatggaacaatacatggaatcaagcatgctgcaagggcaatgatcaaaggtaacaacaaaggaggatccatcatatgtacttcaagtgctgcatccatcatgggtggattggccttgcatggatataccatgacaaaagcagcaattgatgggttggtgagaagtgctgcttgtgagttgggagagcatttgattcgtgttaactgcatttccccacatggagtcccctctgagatgcttctcagtgcttgtagaagatttggacatgatgatattacccctcaaggggtgaaggaaatgattgggagcagggcaagtttgcttaaggggaaaggtgcaaccattgaagatgtggcacatgctgctttgttcttggctagtgatgagtctggcttcattacagcacacaatcttcttattgatgggggacacacatctgctgatagcagaatgagttacatgtaccaagacccaaaatgatgagaattatgtaactatcgtttgtagaggaaacacaagaacttgatgatagaatataaaagatttacaataattacatatattctatcacttgatactcttaactttatctactatagttctttaatttccattcgagaataatatatcgtttcttctttgggcctt

SEQ ID NO: 1041 - protein, 288 aa, Glycine max
  misc_feature: Ceres CLONE ID no.554053
  misc_feature: Bit score of 341.1 for HMM based on sequences of FIGURE 8.
  misc_feature (24)..(190): Pfam Name: adh_short Pfam Description: short chain dehydrogenase
  misc_feature: Functional Homolog Of Ceres SEEDLINE ID no. ME18396 at SEQ ID NO. 1012
MEPQHVTDQNIETKKSSTKRLADKVAVITGGARGIGAAAAKLFAENGAHVVIADVLDELGTTVAKSIGGHYIHCDVSKEDDVESAINLALSWKGHLDIMLSNAGIGGPEGRSITTLEMDRVRHLFSINLYGTIHGIKHAARAMIKGNNKGGSIICTSSAASIMGGLALHGYTMTKAAIDGLVRSAACELGEHLIRVNCISPHGVPSEMLLSACRRFGHDDITPQGVKEMIGSRASLLKGKGATIEDVAHAALFLASDESGFITAHNLLIDGGHTSADSRMSYMYQDPK

SEQ ID NO: 1042 - DNA, 1706 bp, Triticum aestivum
  misc_feature: Ceres CLONE ID no.677797
  misc_feature: Encodes the peptide sequence at SEQ ID NO 916
atcaaaccctctccctcctccactccccccgaaccagcgccatcacatcttctcttctcttcgtccgttgctcccgttgaagcccaggcaccttcttgctttctcccaccgcttcttcggtctctctccctgtgtcggcccgcgctctcgtcatgacgaaccacgccgcctttgctgccgaggacgcggtcaccgccgtggcggcgccggtgcagccgggtcgccatttcgcgtcgttcccgccgcggagggcccgcgactgcaggaaggccgccctgggccgcatggatctcgccacctcgggggtgctgatggccgggtctctgctggactcgatgaaggcctcctcgccccgccacgccatgccccccgccggcgccgaccacgaggagtggatcgagaagcacccgtcagcattggagtggttcgagggcgtgctcgcggcgaccgaggggaagcagatcgtcatgttcctcgactacgacggcaccctttcgccgatcgtccaggaccccgaccgcgccgtcatgaccgaggagatgagggatgcggtgaggggcgtcgcgcagcatttcccgacggccatcgtgagtgggagatgcagagacaaggtgttcaactttgtgaaactggaggagctgtactacgccgggagccacggcatggacatcaagggccccaccaaagtgtctaaccacaaggcaaaggctgacgaggttctgtgccagccggcgaccgagttcttgcctgtcattcaggaggtgtatgagaagctgacggcgaagatggagtccatcccgggggccatggtggagaacaacaagttttgcctctcggtgcacttccgctgcgtcgaggaggcggaatgggatgctctgggcagggaggtgaaggcagtgctggacgactacccgaaactctgcctcaccaaggggagaaaggtcctcgagatccggccctccatcgagtggaacaagggacacgctctcaagttcttgctcaagtctctcggctatgcggggcgcagcgacgttttcccgatatacatcggggatgaccgcacagatgaggatgcattcaaggtgctgcgcaacatgggacaaggcatcgggatccttgtgaccaagtttccgaaggacacaagcgcatcctactctctgcgtgagcctgctgaggtaaaggagttcctgcgcaagctggtgaagagcaacgcgacaaagaaggggtaattcatcgatcaacagccctctagctctaactcaacatggagatcgagcaacctatatagctagtgcatcaagtctagcttgttccttcctggacttgatggtgtctttggcgtttgattttagtagaacaatgcatgcatgcgtgttgggatccatgtataagatccagatcgagcagtgacccctgccctgctaggccttggctttgaaggtttctattactgtatccttctcgcgaggtcttgtaattagccttccgttattagctattcccttcgttccaaattactcgtcgcagaaatggatgtatctagaactaaaatacatctagatacatccatacctgcgacaagtaattcggaacggagggagtatgacagaaatgggagtgacaaagtagccctcccttttctcaccccgcactgtaaaattgttctcgcttgcttccttccttccttcctaaaaaaaaaaaaaaaa

SEQ ID NO: 1043 - protein, 362 aa, Triticum aestivum
  misc_feature: Ceres CLONE ID no.941845
  misc_feature: Bit score of 565.8 for HMM based on sequences of FIGURE 9.
  misc_feature (108)..(334): Pfam Name: Trehalose_PPase Pfam Description: Trehalose-phosphatase
  misc_feature: Functional Homolog Of Ceres SEEDLINE ID no. ME20095 at SEQ ID NO. 1129
MANQDVVLRPDMGGIASAAAMPGSSSRPIFACRGAASTSLRRRSGVDDDYGARSPCATSWVVQAMRASSPARSAAVDEYAAWTRKHPSALASFEQIAASAKGKQVVVFLDYDGTLSPIVADPDTAFITGEMREAVRGVAKHFPAAIVTGRCVEKVCSFVGLSELYYAGSHGMDIKGPGSNAEEVLLQPAREFLPVIAEVYEALVEKTKSTPGARVENKFCLSVHFRCVDEKRWSPLAEQVKEVLRDYPDLRLNEGRKVLEIRPSIMWDKGKAVEFLLQSLGFDGRSDVLPLYLGDDRTDEDAFKMLRKRGHGLGILVSKCPRETDASYSLQDPTEVMEFLHRLVQWKRRRSSSSSSAMRARV

SEQ ID NO: 1044 - DNA, 1284 bp, Zea mays
  misc_feature: Ceres CLONE ID no.391449
  misc_feature: Encodes the peptide sequence at SEQ ID NO 1045
agattttgacaacgccttcccaacttgctcgctcccgcaacgacagcgcgcacttggattcggcgaccaccggagcgcggaggaggcacaggcgccgatctaaagacgatggccgccgcgggctcctcgccgtccttctcctcctcgagtaagcgggcgatgaattgaaggatccacccaggccaagcactggtgctctgtgcttatcttttagcgagcgaagtggtcatttccccctctcttctttatgggaggaaaataggaaatggtgtgccaagtgtatcctcaaccattctactgttccaaacgtgcagtatacatcggcatacagtcgatccagttgcaacaccatagctggaagggaaggtggccctcgtcactggtggcgccaccggcatcggtgaggccatcgttcgcctcttcatggagcacggcgccaaggtctgcatcgcggacatccaggatgaggctgggcagcagctgcgcgacgccctgggaggtgacgcgcagggcgccatgttcgtccactgcgacgtgacgtcggaggaggacgtgagccgcgccgtggacgctgcggcggagcggttcggcgcgctggacgtgatggtgaacaacgccggcgtgacgggcaccaaggtgacggacatccgcaacgtggacttcgcggaggcgcgcagggtgctcgacgtcaacgtgcacggcgtgttcctggggatgaagcacgcggcgcgcgctatgatcccgcggaagcggggctccatcgtgtcgctggccagcgtggccagcgccatcggcgggacgggcccgcacgtctacacggcgtccaagcacgccgtggtcgggctcaccaagagcgtcgccgcggagctcggccgccacggggtgcgcgtcaactgcgtgtccccctatgccgtgcccacggcgctgtcgatgccgcacctgccccagggcgcgcgcgcagatgacgcgctcaaggacttcctggcctttgtcggcggcgaggccaacctcaagggcgtcgacgccatgcccgaggacgtcgcccaggcggtgctctacctggccagcgacgaggcgaggtacgtcagcgcggtcaacctcatggtggacggaggcttcacagccgtaaacaataacctcagggcgtttgaggattagttgaggcatttatgccagctctgggattgggagggagtattaccgctatttcttctgctgttgtgacaagtgtgtgcaagactaataaaccgcagcatgttcatgtagccaaaaaaaaaaaaaaaa

SEQ ID NO: 1045 - protein, 244 aa, Zea mays
  misc_feature: Ceres CLONE ID no.391449
  misc_feature: Bit score of 560.5 for HMM based on sequences of FIGURE 8.
  misc_feature (18)..(150): Pfam Name: adh_short Pfam Description: short chain dehydrogenase
  misc_feature: Functional Homolog Of Ceres SEEDLINE ID no. ME18396 at SEQ ID NO. 1012
MEHGAKVCIADIQDEAGQQLRDALGGDAQGAMFVHCDVTSEEDVSRAVDAAAERFGALDVMVNNAGVTGTKVTDIRNVDFAEARRVLDVNVHGVFLGMKHAARAMIPRKRGSIVSLASVASAIGGTGPHVYTASKHAVVGLTKSVAAELGRHGVRVNCVSPYAVPTALSMPHLPQGARADDALKDFLAFVGGEANLKGVDAMPEDVAQAVLYLASDEARYVSAVNLMVDGGFTAVNNNLRAFED

SEQ ID NO: 1046 - protein, 369 aa, Arabidopsis thaliana
  misc_feature: Public GI ID no.30683008
  misc_feature: Bit score of 725.7 for HMM based on sequences of FIGURE 9.
  misc_feature (116)..(350): Pfam Name: Trehalose_PPase Pfam Description: Trehalose-phosphatase
  misc_feature: Functional Homolog Of Ceres SEEDLINE ID no. ME20095 at SEQ ID NO. 1129
MSASQNIVVSETTMSSIIPNNNNNNNNSSSQKLPPCLISISKKKLLKNIDIINGGGQRINAWVDSMRASSPTHLKSLPSSISTQQQLNSWIMQHPSALEKFEQIMEASRGKQIVMFLDYDGTLSPIVDDPDKAFMSSKMRRTVKKLAKCFPTAIVTGRCIDKVYNFVKLAELYYAGSHGMDIKGPAKGFSRHKRVKQSLLYQPANDYLPMIDEVYRQLLEKTKSTPGAKVENHKFCASVHFRCVDEKKWSELVLQVRSVLKKFPTLQLTQGRKVFEIRPMIEWDKGKALEFLLESLGFGNTNNVFPVYIGDDRTDEDAFKMLRDRGEGFGILVSKFPKDTDASYSLQDPSEVMDFLRRLVEWKQMQPRM

SEQ ID NO: 1047 - DNA, 1090 bp, Gossypium hirsutum
  misc_feature: Ceres CLONE ID no.1846400
  misc_feature: Encodes the peptide sequence at SEQ ID NO 1048
ctcgcttttcacccatcctatcttaaatcaactcgcttccgatccgctggcagacccgtcccagacccgccacgagtggactctcctcttaaccttccagttctgttacctaaattcaactttagaattaccaattaatttcatcgtgttatctaagatgacagacttaaccaagaagaaattagccggaaaagtagccatagtcaccggcggagcaagcggtatcggcgaagccacagcgcgtttgttcgccgagcacggcgcccgtatgaccatcatcgctgatatccaagaccaactcggccaacaagtagctacttcaatcggttcccacaattgtacttacagtcgctgcgacgttaccgatgaaaaccaagtgaaagcattggtcgaattaagtattcaaaagtatggtcaacttgatataatgtttagcaatgctgggattataagtaaatccgatcagagcattcttgatcttgatttccgacagtttgatgggttgatggcggtcaacctccgtggcatgtctgcatgcgttaagcacgcggcgcgtgcgatggtggagaaaaaggtgagaggaagtattgtatgcacggcgagtgtggcggccagccatggaacgaaacggcggacggactattgcatgtcgaagcatggggtgttgggattagttcgattggcgagtaaacagctagggatgtatggtataagggtaaactgtgtgtcgccgaatgggttggcgacgccgatgacatgcgaggtgcatgagaagagtgtggaggaggttgaggaaatctacgaggctggaagggctctgaaaggagcggtgttgagagccgaacacgtggcggatgcagtgctgtttcttgcaagtgatgagtcggagttgattactggccatgacctcgccgtcgacggtggcttccaagcttggtaatttttgcttttgctttcagtaattctttttcttaatcctatggtttttgcagaacattttgacttgattgtattactttgtaattaatatgcttttgtatttttataacttaattattttcttctactctaaaaaaaaaaaaaaaaaaaa

SEQ ID NO: 1048 - protein, 260 aa, Gossypium hirsutum
  misc_feature: Ceres CLONE ID no.1846400
  misc_feature: Bit score of 327.3 for HMM based on sequences of FIGURE 8.
  misc_feature (12)..(181): Pfam Name: adh_short Pfam Description: short chain dehydrogenase
  misc_feature: Functional Homolog Of Ceres SEEDLINE ID no. ME18396 at SEQ ID NO. 1012
MTDLTKKKLAGKVAIVTGGASGIGEATARLFAEHGARMTIIADIQDQLGQQVATSIGSHNCTYSRCDVTDENQVKALVELSIQKYGQLDIMFSNAGIISKSDQSILDLDFRQFDGLMAVNLRGMSACVKHAARAMVEKKVRGSIVCTASVAASHGTKRRTDYCMSKHGVLGLVRLASKQLGMYGIRVNCVSPNGLATPMTCEVHEKSVEEVEEIYEAGRALKGAVLRAEHVADAVLFLASDESELITGHDLAVDGGFQAW

SEQ ID NO: 1049 - DNA, 840 bp, Populus balsamifera subsp. trichocarpa
  misc_feature: Ceres ANNOT ID no.1475185
  misc_feature: Encodes the peptide sequence at SEQ ID NO 1050
atgagttccaatccttcagcatctcccatcagcaaaaggctagaaggcaaggtggcattgataactggtggagctagtggcataggtgagtgcacagcaaggctatttgttcaacacggttccaaggtccttattgcggatgttcaagacgatctcggccgtgctctctgccaagaatacggctctgaggaaatcatctcttatgtccactgcaatgtaacagtcgattctgatgtccaaaatgcggttgatacagctgtttccaggtacggtaagctagacatcatgttcaacaatgctggaatttcaggcaacaccaaatcatctatcttgaattctgataatgaagactttatgagagtccttaatatcaatgtctgtggcggattcttgggtgccaaacatgctgcgagggtgatgattccagctaagaaagggtgcatcctcttcactgcaagtgtggcttcagttctatacggtgaattggcacacgcatatacagcatcgaagaatgctattgtagggttggcgaagaacttgagcgtggacttaggccaacatgggataagagttaatagtatttctcccactgctgttgctaccccaatgcttacagatgctttgagaatgacaaaggaggctgcagagaaatttgttgcatcagcagccaacttaaaagaagcggtattggaaccagaagacgttgcacaagcagccttatatctagccagtgatgactccaagtacgtgagtggggtcaacttggtgatcgatggaggctataaccttaccaatccctcacttgccatggcaatgaaaagcttgttttccaaagtttaa

SEQ ID NO: 1050 - protein, 279 aa, Populus balsamifera subsp. trichocarpa
  misc_feature: Ceres ANNOT ID no.1475185
  misc_feature: Bit score of 515.5 for HMM based on sequences of FIGURE 8.
  misc_feature (17)..(185): Pfam Name: adh_short Pfam Description: short chain dehydrogenase
  misc_feature: Functional Homolog Of Ceres SEEDLINE ID no. ME18396 at SEQ ID NO. 1012
MSSNPSASPISKRLEGKVALITGGASGIGECTARLFVQHGSKVLIADVQDDLGRALCQEYGSEEIISYVHCNVTVDSDVQNAVDTAVSRYGKLDIMFNNAGISGNTKSSILNSDNEDFMRVLNINVCGGFLGAKHAARVMIPAKKGCILFTASVASVLYGELAHAYTASKNAIVGLAKNLSVDLGQHGIRVNSISPTAVATPMLTDALRMTKEAAEKFVASAANLKEAVLEPEDVAQAALYLASDDSKYVSGVNLVIDGGYNLTNPSLAMAMKSLFSKV

SEQ ID NO: 1051 - protein, 274 aa, Oryza sativa subsp. japonica
  misc_feature: Public GI ID no.115457148
  misc_feature: Bit score of 544.7 for HMM based on sequences of FIGURE 8.
  misc_feature (18)..(185): Pfam Name: adh_short Pfam Description: short chain dehydrogenase
  misc_feature: Functional Homolog Of Ceres SEEDLINE ID no. ME18396 at SEQ ID NO. 1012
MAAGSSHVSADARKLVGKVAVITGGASGIGACTARLFVKHGARVVVADIQDELGASLVAELGPDASSYVHCDVTNEGDVAAAVDHAVARFGKLDVMFNNAGVSGPPCFRMSECTKEDFERVLAVNLVGPFLGTKHAARVMAPARRGSIISTASLSSSVSGAASHAYTTSKHALVGFTENAAGELGRHGIRVNCVSPAGVATPLARAAMGMDDEAIEAIMANSANLKGAGALKADDIAAAALFLASDDGRYVSGQNLRVDGGLSVVNSSFGFFRD

SEQ ID NO: 1052 - DNA, 831 bp, Populus balsamifera subsp. trichocarpa
  misc_feature: Ceres ANNOT ID no.1454960
  misc_feature: Encodes the peptide sequence at SEQ ID NO 1053
atgaatgactcttctctaccagctcctcttgccaagaggctagaaggcaaggtagctttgatcacaggagcagctagtggcatcggcgaaaccactgcaagactctttgttcaacatggtgcaaaagttgtaattgccgacatccaagatgagctaggtcactctgtgtgcaatgaaatcggctccgattatgtccactgtgatgttactagcgagattgatgtccaaaatgccgtagagactacaatctcaaagcatggtaagctagatataatgtttagtaatgctggcatagctgacgccaagctcgatataagcatcttagcatttgagcacgaagattacaagaaagttttcgacgtgaatatgtatggtgcattcttgtcagccaagcacgctgcaaaagtaatgatcccggcaaagaagggcagtattatattcacttcaagctttgcttcggtgtgttatggggctatgctcccatacgcatatgctgtgtcaaaacatgctctggttggacttactaagaacttgtgtgtagaattagggcaatatggaattagagttaattgcatttcaccatttggtgtagcaactccattattaaggaaaggattgggagggatcgaccagaagacggtggaggagtttatttgtacatcagcgaacttgaaggaggcagtgctgaaagcaagtgatgtggcagaggcagcactgtatttgggtggtggtgattccaagtatgttagtggactaaatttggttatcgacggtggctatagcaccaccaatgtggccataagagagcaaatgaaagaatatttcggttaa

SEQ ID NO: 1053 - protein, 276 aa, Populus balsamifera subsp. trichocarpa
  misc_feature: Ceres ANNOT ID no.1454960
  misc_feature: Bit score of 498.1 for HMM based on sequences of FIGURE 8.
  misc_feature (17)..(183): Pfam Name: adh_short Pfam Description: short chain dehydrogenase
  misc_feature: Functional Homolog Of Ceres SEEDLINE ID no. ME18396 at SEQ ID NO. 1012
MNDSSLPAPLAKRLEGKVALITGAASGIGETTARLFVQHGAKVVIADIQDELGHSVCNEIGSDYVHCDVTSEIDVQNAVETTISKHGKLDIMFSNAGIADAKLDISILAFEHEDYKKVFDVNMYGAFLSAKHAAKVMIPAKKGSIIFTSSFASVCYGAMLPYAYAVSKHALVGLTKNLCVELGQYGIRVNCISPFGVATPLLRKGLGGIDQKTVEEFICTSANLKEAVLKASDVAEAALYLGGGDSKYVSGLNLVIDGGYSTTNVAIREQMKEYFG

SEQ ID NO: 1054 - DNA, 1257 bp, Triticum aestivum
  misc_feature: Ceres CLONE ID no.936084
  misc_feature: Encodes the peptide sequence at SEQ ID NO 1055
actccaccagcaagagcattattcagtggaagctctcacgctctgcttctgcctccccacgacgccccgccccgcccgtcccgtcccggcaacgaagccggagctccactcccgagacgatgtcggccgccgccggcggcagctcctcctcctccacatcagcgccgcggttggaagggaaggttgcgctggttaccggcggcgcctccggtatcggcgaagccatcgtccgcctcttcagacagcacggcgccaaggtttgcatagcagatgtccaggatgaagccggtcagcagctccgcgactccctcggaggcgaccccgatgtcctgttcgtccactgcgacgtcacagtcgaggaagacataagccgggccgtcgatgcaacagccgagaagtttggcaccctcgacatcatggtcaacaatgccggcattacgggcgacaaggtcaccgatatccggaacctcgactttgctgatgtcaagaaggtgttcgacatcaacgtgcacggcatgctgctgggcatgaagcacgcggcgcgcgtcatgatcccgagcaagaaggggtctattgtctcgttggcgagcgttgccagtgtcatcggagggatggggcctcacgcatacaccgcgtcgaagcacgcagtggtgggtctcaccaagagtgtggcattggagctggggaggcatggcatacgggtgaactgcgtgtcgccgtacgccgtgcccacagcgctctccatgccgcatttgccccagggggagcaaaagggtgatgcagtgagagacttcctggcctttgttggcagtgaggcaaacctgaaaggtgttgatctgctgccgaaggatgtcgccgaggcggtgctctacctggcaagcgacgaagcgaggtacatcagcgcgctcaacctcgtggtcgacggtggatttacatctgtgaatggcaacctgaaggcgtttgaggactagttgaagtctttagctgcatttgttacttggtatctgaaagcatttgagtaccatttctgatttgcctgtgttagcatgtcaataaggtgggtgatcatgtgtaaaattggataattgttctatattagtgcttaaggacagtgctgattattattgatattactctgttgaacctgtgagatgtgacaggaccttgtgtaacattcagttaagagtttcataaagacttctgtggcagtatatctgcgaaatagaaaccagttaacttcgaaaaaaaaaaaaaaaa

SEQ ID NO: 1055 - protein, 283 aa, Triticum aestivum
  misc_feature: Ceres CLONE ID no.936084
  misc_feature: Bit score of 710.7 for HMM based on sequences of FIGURE 8.
  misc_feature (21)..(189): Pfam Name: adh_short Pfam Description: short chain dehydrogenase
  misc_feature: Functional Homolog Of Ceres SEEDLINE ID no. ME18396 at SEQ ID NO. 1012
MSAAAGGSSSSSTSAPRLEGKVALVTGGASGIGEAIVRLFRQHGAKVCIADVQDEAGQQLRDSLGGDPDVLFVHCDVTVEEDISRAVDATAEKFGTLDIMVNNAGITGDKVTDIRNLDFADVKKVFDINVHGMLLGMKHAARVMIPSKKGSIVSLASVASVIGGMGPHAYTASKHAVVGLTKSVALELGRHGIRVNCVSPYAVPTALSMPHLPQGEQKGDAVRDFLAFVGSEANLKGVDLLPKDVAEAVLYLASDEARYISALNLVVDGGFTSVNGNLKAFED

SEQ ID NO: 1056 - protein, 275 aa, Solanum tuberosum
  misc_feature: Public GI ID no.50346893
  misc_feature: Bit score of 624.4 for HMM based on sequences of FIGURE 8.
  misc_feature (14)..(182): Pfam Name: adh_short Pfam Description: short chain dehydrogenase
  misc_feature: Functional Homolog Of Ceres SEEDLINE ID no. ME18396 at SEQ ID NO. 1012
MADTSLPIQRLLGKVALVTGGATGIGESIVRLFHKHGAKVCIADIRDEVGQHVCETLGNDQNVCFIHCDVTVEADVSNAVDFTVQKFGTLDIMVNNAGLSGPPIRDIRDYELSVFENVLDVNLKGAFLGMKHAARIMIPLKKGAIVSLCSVASAIGGIGPHGYAASKYAVLGLTQNVAAEMGKHGVRVNCVSPYAVATGLALAHLPEDEKTDDAMEGFRDFVARNANLQGVELMANDVANAVLFLASDESRYISGHNLMVDGGFSCVNHSLRVFR

SEQ ID NO: 1057 - DNA, 1152 bp, Gossypium hirsutum
  misc_feature: Ceres CLONE ID no.1931526
  misc_feature: Encodes the peptide sequence at SEQ ID NO 1058
aatccattgttgaattttaagaaacaatgtcacactcccaggaattataaagagcagaatcacaaagaggagaaaacacagcatcccaatcattgaaatcaaaagaaaaagcaaaggggagggcctgttttcttcacaaccaccatgagctgcgagtcttcaataaccaagaggctggatggcaaggtggcactgataactggtggtgccagtggcttaggaaagtgcacagccacactatttgtcaaacatggagccaaggttctcattgctgatattcaagacgaattgggcgactctgtttgccaagagcttggaactgaaaacatcagctatgtccactgcgatataacgtgcgaatccgatgttgaaaatgccgtaaacttggctgtctccaagtacggaaagctcgatatcatgttcaacaatgccggcactcttggtgacaacgaagcaagagtgacacacgccagcacggaggacttcaagagagtgttcgatatcaatgtgttgggtggtttcttgggtgccaagtatgctgccagggtcatggttccggccaagaaaggttgcatactattcacttcaagtcttgcttcaaaaatcagcttcggtagcccccatgcatacaaggcatcgaagcatgccgttgcagggttgacgaagagcttggccgtggagttaggtgagcatggaattagagtcaactctatttcacctcatgcaatttcgactccaatgttccaaaaatcaattgggatacccgataagaagaagggagaggagatgattgcggcttcagcagtgttgaaaggcactgtattggagcctgaagattttgcacatgcagcactgtatttggcaagtgatgaggctaaatttattagtggtgtcaacttaccaatcgatggagggtatagtctcagcaatcaatcatggaagctgggattcgcagcactttttggataaaccaccaagtcctctgcttcactctttgaattatagtctcttaaataaggaaaataaaacttatccaaaattacacacatgaaaatttgtattgtcggatttgatcagtctcctgtaatgcttttgaagtgtcctttctttatcaataccacttgctttgctgaaaaaaaaaaaaaaaaaaaa

SEQ ID NO: 1058 - protein, 274 aa, Gossypium hirsutum
  misc_feature: Ceres CLONE ID no.1931526
  misc_feature: Bit score of 498.7 for HMM based on sequences of FIGURE 8.
  misc_feature (14)..(181): Pfam Name: adh_short Pfam Description: short chain dehydrogenase
  misc_feature: Functional Homolog Of Ceres SEEDLINE ID no. ME18396 at SEQ ID NO. 1012
MSCESSITKRLDGKVALITGGASGLGKCTATLFVKHGAKVLIADIQDELGDSVCQELGTENISYVHCDITCESDVENAVNLAVSKYGKLDIMFNNAGTLGDNEARVTHASTEDFKRVFDINVLGGFLGAKYAARVMVPAKKGCILFTSSLASKISFGSPHAYKASKHAVAGLTKSLAVELGEHGIRVNSISPHAISTPMFQKSIGIPDKKKGEEMIAASAVLKGTVLEPEDFAHAALYLASDEAKFISGVNLPIDGGYSLSNQSWKLGFAALFG

SEQ ID NO: 1059 - protein, 370 aa, Arabidopsis thaliana
  misc_feature: Public GI ID no.42568786
  misc_feature: Bit score of 683.5 for HMM based on sequences of FIGURE 9.
  misc_feature (119)..(353): Pfam Name: Trehalose_PPase Pfam Description: Trehalose-phosphatase
  misc_feature: Functional Homolog Of Ceres SEEDLINE ID no. ME20095 at SEQ ID NO. 1129
MVSQNVVVSDAKTGIITVSTVSNSSVFTPTAQKPPTAPGYISVSKKKLLKNLEINGADQSQRLNSWVDSMRASSPTHLKSLSSFSSEEEHNSWIKRHPSALNMFERIIEEARGKQIVMFLDYDGTLSPIVDDPDRAFMTSKMRRTVKKMAKCFPTSIVTGRCIDKVYSFVKLAELYYAGSHGMDIKGPTKGFSRYNKDKPSVLYQPAGDFLPMIDEVYKQLVEKTKSTPGAKVENNKFCLSVHFRCVDEKKWSELASKVRSVVKNYPTLKLSQGRKVFEIRPIIKWNKGKALEFLLESLGFENCNDVFPIYIGDDKTDEDAFKLLRGRGQGFGILVSKFPKDTSASYSLQDPPEVMNFLGRLVEWKQMQQ

SEQ ID NO: 1060 - DNA, 918 bp, Populus balsamifera subsp. trichocarpa
  misc_feature: Ceres ANNOT ID no.1454260
  misc_feature: Encodes the peptide sequence at SEQ ID NO 1061
atgcctggtcaagtgatgcaagagaaaacccttcaaagcattcatgtcatgggaagggaaaagtcgacagaaaacagcactcgctctcctggaagattggagggaagagttgcaatagtcacaggcggtgcgcgaggaattggagaggccactgtaagactttttgcaagacaaggtgccaaagtagtcattgctgatgttgaggatgctcttggaacttcgctcgtaaactcattagccccttcagtttcctttgttcattgtgatgttagcttagaaaaagacattgagaacctgataaactccacgatttctcaatatggtaagttagatattcttttcaacaatgctggggtgcttggaaatcaatcaaagaacaagagcattgttgattttgatgtagacgaatttgaccgtgtcatgcatgtgaatgttagaggaatggcactaggaattaagcacgcagcacgagtgatgattcctagaggaggtgggtgtattatttccacagctagtgtggctggtgtcatgggagggcttggtcctcatgcttacacagcttcaaagcatgccattgttggactcacaaaaaacacagcttgtgagcttggccggtatggaattcgagttaattgcatttctccatttggggtggccacatctatgcttgttaatgcctggagaagtagtggcgaagaggaagattccttgaattttggattgcctagtgaaaaggaagtggagaagatggaggactttgttagagggctggctaacctaaaaggtccaactctaagggctagagatatagctgaagctgctctttatctagctagcgatgaatcaaagtatgtcagtggtcataatcttgttgtggatggtggaatcacaacttcaacaaattgtgttgggttgtaa

SEQ ID NO: 1061 - protein, 289 aa, Populus balsamifera subsp. trichocarpa
  misc_feature: Ceres ANNOT ID no.1454260
  misc_feature: Bit score of 479.2 for HMM based on sequences of FIGURE 8.
  misc_feature (20)..(188): Pfam Name: adh_short Pfam Description: short chain dehydrogenase
  misc_feature: Functional Homolog Of Ceres SEEDLINE ID no. ME18396 at SEQ ID NO. 1012
MGREKSTENSTRSPGRLEGRVAIVTGGARGIGEATVRLFARQGAKVVIADVEDALGTSLVNSLAPSVSFVHCDVSLEKDIENLINSTISQYGKLDILFNNAGVLGNQSKNKSIVDFDVDEFDRVMHVNVRGMALGIKHAARVMIPRGGGCIISTASVAGVMGGLGPHAYTASKHAIVGLTKNTACELGRYGIRVNCISPFGVATSMLVNAWRSSGEEEDSLNFGLPSEKEVEKMEDFVRGLANLKGPTLRARDIAEAALYLASDESKYVSGHNLVVDGGITTSTNCVGL

SEQ ID NO: 1062 - protein, 281 aa, Oryza sativa subsp. japonica
  misc_feature: Public GI ID no.115456131
  misc_feature: Bit score of 707.3 for HMM based on sequences of FIGURE 8.
  misc_feature (19)..(187): Pfam Name: adh_short Pfam Description: short chain dehydrogenase
  misc_feature: Functional Homolog Of Ceres SEEDLINE ID no. ME18396 at SEQ ID NO. 1012
MSAAAAAAASSPAPRLESKVALVTGGASGIGEAIVRLFREHGAKVCIADIQDEAGQKLRDSLGGDQDVLFVHCDVSVEEDVARAVDATAEKFGTLDIMVNNAGFTGQKITDIRNIDFSEVRKVIDINLVGVFHGMKHAARIMIPNKKGSIISLGSVSSVIGGLGPHSYTATKHAVVGLTKNVAGELGKHGIRVNCVSPYAVPTALSMPYLPQGERKDDALKDFFAFVGGEANLKGVDLLPKDVAQAVLYLASDEARYISALNLMVDGGFTSVNHNLRAFED

SEQ ID NO: 1063 - DNA, 1120 bp, Arabidopsis thaliana
  misc_feature: Ceres CLONE ID no.159151
  misc_feature: Encodes the peptide sequence at SEQ ID NO 1064
aaaactccgattgagaggtgtttgcatgattcctgagcttgtctgtgtcaatagtgaggcactacatcgaggaataagaaagaagatctaaggagctaaagctattatgtcaacgaacactgaatcttcttcttattcttctcttcctagtcaaaggcttttgggtaaagtggcattgatcactggaggagccacagggataggtgagagcattgttcgtctgttccacaagcacggtgccaaagtctgcattgttgatctgcaagatgatctcggaggtgaggtgtgtaaaagtctgcttcgtggtgagtccaaggagacggcttttttcatccatggcgatgttagagtggaagatgacattagcaatgcggttgactttgcagtcaaaaattttgggacgcttgatatacttatcaacaatgcaggattatgtggagcaccgtgccctgatattcgtaattatagtttgagtgagttcgagatgacctttgatgtgaatgtgaaaggagcttttctaagcatgaaacatgcagctcgtgtaatgataccggagaagaaagggtcgatagtttccttatgtagtgtgggaggtgttgtgggaggcgttggtccacattcttatgttggttccaagcatgctgttctaggcttgactaggagtgttgcagcggagcttggacagcacgggatacgtgtgaactgtgtttcgccttacgcggttgcaactaaactcgctttggctcatttgccggaggaagaaagaacggaggatgcatttgttggtttcaggaattttgctgctgcaaacgcgaatctaaaaggggtggaactgacggttggtgatgtagcgaacgctgttctgtttttggctagcgatgactcgcggtacataagcggagataatttgatgattgatggaggattcacttgcactaaccactcctttaaagtcttcagatgatgcattttgctaaagaatgttgtttaatgtttattgtccgccaatttatcatgtctatcaaataatttaactgtggagcttattgtggttttaattgttacttttagcattgtagaaatgtttgatgttaactacatttcttactggtagacattg

SEQ ID NO: 1064 - protein, 285 aa, Arabidopsis thaliana
  misc_feature: Ceres CLONE ID no.159151
  misc_feature: Bit score of 585.4 for HMM based on sequences of FIGURE 8.
  misc_feature (21)..(192): Pfam Name: adh_short Pfam Description: short chain dehydrogenase
  misc_feature: Functional Homolog Of Ceres SEEDLINE ID no. ME18396 at SEQ ID NO. 1012
MSTNTESSSYSSLPSQRLLGKVALITGGATGIGESIVRLFHKHGAKVCIVDLQDDLGGEVCKSLLRGESKETAFFIHGDVRVEDDISNAVDFAVKNFGTLDILINNAGLCGAPCPDIRNYSLSEFEMTFDVNVKGAFLSMKHAARVMIPEKKGSIVSLCSVGGVVGGVGPHSYVGSKHAVLGLTRSVAAELGQHGIRVNCVSPYAVATKLALAHLPEEERTEDAFVGFRNFAAANANLKGVELTVGDVANAVLFLASDDSRYISGDNLMIDGGFTCTNHSFKVFR

SEQ ID NO: 1065 - DNA, 1155 bp, Panicum virgatum
  misc_feature: Ceres CLONE ID no.1792501
  misc_feature: Encodes the peptide sequence at SEQ ID NO 1066
atccactctgacttccactctcctccccctcacccccatctttcttgctctcgccgcgacgacgcgcacccgcaccggattcgggcgacgccggcggcaggctccgatctagagacgatgtcagccgcgggctcctcgccgtccgcctcctcctccaccaagcggttggaagggaagtccgccctcgtcaccggtggtgccaccggtattggtgaagccatcgttcgcctcttcagagagcatggcgcgaaggtcggcatcgcggacgtccaggacgaagccggccagcggctgcgcgacgccctcggagaccaggacgtcatgttcgtccactgcgacgtcacggtcgaggaggacgtgagggccgccgtcgacgcggcggccgcgcggttcggcgcgctggacatcatggtgaacaacgccggcatcacgggcaacaaggtcaccgacatccgcaacgtggacttcgccgaggtgcgcaaggtgttcgacatcaacgtgcacggcgtgttcctcgggatgaagcacgcggcgcgcatcatgatcccccagaagcgcggctccatcgtgtcgctggcgagcgtggccagcgtcatcggcgggatgggcccgcacgcgtacaccggctccaagcacgccgtggtcgggctcaccaagagcgtcgccggggagctcgggcgccacggggtgcgcgtcaactgcgtgtcgccctacgccgtgcccacggcgctgtccatgccgcacctgccccagggcgcgcgcgccgacgactccctcaaggacttcctggccttcgtcggcggcgaggccaacctcaagggtgtcgacgtgatgcccagggatgtggccgaggcggtgctctacctggcaagcgacgaggcgaggtacgtcagcgcgctcaacctcatggtggacggcggcttcacagccgtgaaccataacctgaaagcgttcgaggattagctcaagctgttggcagcatttgccagctctggtagtgttgtccctgctgttctgctgcaattcagagatgtggcatgtgctaatatatgtagcagattcgactgtgctgtattcatgtgtctgcaagactaatgtgccagtatatgaatgtctcgcaactgattggatattcaaaaaaaaaaaaaaaaaaaa

SEQ ID NO: 1066 - protein, 281 aa, Panicum virgatum
  misc_feature: Ceres CLONE ID no.1792501
  misc_feature: Bit score of 714.6 for HMM based on sequences of FIGURE 8.
  misc_feature (20)..(187): Pfam Name: adh_short Pfam Description: short chain dehydrogenase
  misc_feature: Functional Homolog Of Ceres SEEDLINE ID no. ME18396 at SEQ ID NO. 1012
MSAAGSSPSASSSTKRLEGKSALVTGGATGIGEAIVRLFREHGAKVGIADVQDEAGQRLRDALGDQDVMFVHCDVTVEEDVRAAVDAAAARFGALDIMVNNAGITGNKVTDIRNVDFAEVRKVFDINVHGVFLGMKHAARIMIPQKRGSIVSLASVASVIGGMGPHAYTGSKHAVVGLTKSVAGELGRHGVRVNCVSPYAVPTALSMPHLPQGARADDSLKDFLAFVGGEANLKGVDVMPRDVAEAVLYLASDEARYVSALNLMVDGGFTAVNHNLKAFED

SEQ ID NO: 1067 - DNA, 843 bp, Populus balsamifera subsp. trichocarpa
  misc_feature: Ceres ANNOT ID no.1437875
  misc_feature: Encodes the peptide sequence at SEQ ID NO 1068
atggccaccgcaagctccactgactcatccctctctcctctaaggttattgggcaaagtagcattggtaacaggtggagctaccggtattggggagagcattgcccggctattttgcagacatggtgcaaaagtttgcatagctgatttgcaagacaaccttggacaaaatgtttgcgagtcgcttggtggtgagccaaaaacttgttatatccattgtgatgtcacaatagaggatgatgttcgccaagctgttgactttactgttgataaatttggaacattggatattatggttaacaatgctgggctgggaggtcccccctgtccagatatccgtaaggtggccttatcagactttgaaaaggtgtttgatgtaaatgtgaagggtgtttttcttggaatgaagcatgcagcacggattatgatccccctaaataagggttcaattgtttctctctgtagtgttgccagtgccatagggggtataggcccacatgcttacacagggtcaaagcatgctgtattgggtctgaccagaagtgttgcagctgaactaggaaaacatgggatacgcgtaaactgtgtctctccttatggagttgcgacaagcttggctgtggctcatttgcccgaggatgagaggactgaggatgccttaataggtttccgctcttttattgggaggaatgctaacttgcaaggtgtggaattgacagttgatgatgtggccaatgccgtgctcttcctagcaagtgatgaagcaaggtacataagtggggataatctaatgcttgatgggggcttcacgtgcacaaaccactcactccgtgtcttcagatga

SEQ ID NO: 1068 - protein, 280 aa, Populus balsamifera subsp. trichocarpa
  misc_feature: Ceres ANNOT ID no.1437875
  misc_feature: Bit score of 707.8 for HMM based on sequences of FIGURE 8.
  misc_feature (19)..(187): Pfam Name: adh_short Pfam Description: short chain dehydrogenase
  misc_feature: Functional Homolog Of Ceres SEEDLINE ID no. ME18396 at SEQ ID NO. 1012
MATASSTDSSLSPLRLLGKVALVTGGATGIGESIARLFCRHGAKVCIADLQDNLGQNVCESLGGEPKTCYIHCDVTIEDDVRQAVDFTVDKFGTLDIMVNNAGLGGPPCPDIRKVALSDFEKVFDVNVKGVFLGMKHAARIMIPLNKGSIVSLCSVASAIGGIGPHAYTGSKHAVLGLTRSVAAELGKHGIRVNCVSPYGVATSLAVAHLPEDERTEDALIGFRSFIGRNANLQGVELTVDDVANAVLFLASDEARYISGDNLMLDGGFTCTNHSLRVFR

SEQ ID NO: 1069 - protein, 369 aa, Arabidopsis thaliana
  misc_feature: Ceres CLONE ID no.255364
  misc_feature: Bit score of 666.7 for HMM based on sequences of FIGURE 9.
  misc_feature (116)..(349): Pfam Name: Trehalose_PPase Pfam Description: Trehalose-phosphatase
  misc_feature: Functional Homolog Of Ceres SEEDLINE ID no. ME20095 at SEQ ID NO. 1129
MTNHNALISDAKGSIGVAVRVPNQSLFSPGGGRYISIPRKKLVQKLEADPSQTRIHTWIEAMRASSPTRTRPGNISPLTESDEEDEYSSWMAQHPSALTMFEEIAEASKGKQIVMFLDYDGTLSPIVENPDRAYMSEEMREAVKGVARYFPTAIVTGRCRDKVRRFVKLPGLYYAGSHGMDIKGPSKRNKHNKNNKGVLFQAANEFLPMIDKVSKCLVEKMRDIEGANVENNKFCVSVHYRCVDQKDWGLVAEHVTSILSEYPKLSLTQGRKVLEIRPTIKWDKGKALEFLLESLGFANSNDVLPIYIGDDRTDEDAFKVLRNKGQGFGILVSKIPKETSATYSLQEPSEVGEFLQRLVEWKQMSLRGR

SEQ ID NO: 1070 - DNA, 1290 bp, Gossypium hirsutum
  misc_feature: Ceres CLONE ID no.1842801
  misc_feature: Encodes the peptide sequence at SEQ ID NO 1071
atctctcattgcctcattctcatcattttctatcaaaacaaactatcctctctttttttatgtcctttcaccatctttaagctaattagctacctaagcttcagtagttagtttttttggcaaaaaatgggggaaagaagcattaaatccaccatttttttgttgaattagcagtcacctgctcaaacagtgacgcccgcaaaagaaaggcaagaggaagctgagaacttactgttgaagtgaagctcctgccatggctactagtagcagcaaccccatagattcatcactgtccagccaaagattagtggggaaagtggcattggtcactggtggagcaaccggcattggtgagagcattgtgcgtctatttcacaagcatggtgccaaagtctgcattgttgatgtgcaagacaaccttggcctccaagtttgtcaatcccttggcaacggccccaacgtttgttttttccattgcgacgtgacgatagaagaacaagttcgggccgcggtcgactacgcagttgaaaagtttggtacactcgatatcatggtcaacaatgccgggttatcaggtccaccgtataacgatatccgcaactatgacttatctgatttcgagaaagtaatgaatgtgaatgtaaaaggtgttttccttggaatgaaacatgctgctagaattatgatcccacatgaaaagggttcaatcatttcaacctgtagtgtttcaggtgtcatcggtggcctaggacctcatgcatatacaggctctaaacatgctgttttaggccttactaggaatgttgcatctgagttaggcaaatacgggatacgagtgaattgtgtttctccgtatgccgtcgcaaccgaattggcctttgctcacttgcacgaggacgaaagaactgaagatgtacgaaccggttttcgtgctttcatcgggaaaaacgcgaacctgaatggggtggatttgactgtggagcatgtggctaatgctgtgctgttcttagcaagtgatgatgcagggtatataagtggagacaatcttatggttgatggtgggtttacatcttccaatcactcattgcgtgtcttcagatgaggattgatgaaaatatgaaccaaaatgaggctcattagctttggttcaactattaccagattgtatttcccttctattttctcctgtcactggtatgtaatttgtaacaaaaaacttctaatataattttaattatatctatatataaaatatcatatgctttaatacaaaaaaaaaaaaaaaaaaaa

SEQ ID NO: 1071 - protein, 282 aa, Gossypium hirsutum
  misc_feature: Ceres CLONE ID no.1842801
  misc_feature: Bit score of 625.7 for HMM based on sequences of FIGURE 8.
  misc_feature (21)..(189): Pfam Name: adh_short Pfam Description: short chain dehydrogenase
  misc_feature: Functional Homolog Of Ceres SEEDLINE ID no. ME18396 at SEQ ID NO. 1012
MATSSSNPIDSSLSSQRLVGKVALVTGGATGIGESIVRLFHKHGAKVCIVDVQDNLGLQVCQSLGNGPNVCFFHCDVTIEEQVRAAVDYAVEKFGTLDIMVNNAGLSGPPYNDIRNYDLSDFEKVMNVNVKGVFLGMKHAARIMIPHEKGSIISTCSVSGVIGGLGPHAYTGSKHAVLGLTRNVASELGKYGIRVNCVSPYAVATELAFAHLHEDERTEDVRTGFRAFIGKNANLNGVDLTVEHVANAVLFLASDDAGYISGDNLMVDGGFTSSNHSLRVFR

SEQ ID NO: 1072 - DNA, 468 bp, Glycine max
  misc_feature: Ceres CLONE ID no.533030
  misc_feature: Encodes the peptide sequence at SEQ ID NO 1073
tgccaatgccatgcaggcttgatgggaaggtggcgattatcactggtggtgcgagtggtctaggtgcagccactgcaagactcttctctaagcatggagcatatgtagtcatagctgatattcaagacgacttgggtctctctgttgccaaagagttagaatctgcttcctatgtccattgcgatgtgacaaaggaagaggacgttgaaaactgcgtgaacacaacggtttccaagtatggcaaattagatatcatgtttaacaatgcaggtgtatctgatgagatcaaaacaagcattcttgacaacaacaagtctgattttgagagagtgataagtgttaacttggttggtccttttctgggaacaaagcatgctgcaagggtcatgattcctgctaaaaagggatgcataatcaacacagctagtgttgctggatgcataggtggaggtgctacacatgscctac

SEQ ID NO: 1073 - protein, 154 aa, Glycine max
  misc_feature: Ceres CLONE ID no.533030
  misc_feature: Bit score of 217.9 for HMM based on sequences of FIGURE 8.
  misc_feature (8)..(149): Pfam Name: adh_short Pfam Description: short chain dehydrogenase
  misc_feature: Functional Homolog Of Ceres SEEDLINE ID no. ME18396 at SEQ ID NO. 1012
  misc_feature (153)..(153): Xaa is any aa, unknown, or other
MPCRLDGKVAIITGGASGLGAATARLFSKHGAYVVIADIQDDLGLSVAKELESASYVHCDVTKEEDVENCVNTTVSKYGKLDIMFNNAGVSDEIKTSILDNNKSDFERVISVNLVGPFLGTKHAARVMIPAKKGCIINTASVAGCIGGGATHXL

SEQ ID NO: 1074 - DNA, 1090 bp, Gossypium hirsutum
  misc_feature: Ceres CLONE ID no.1931881
  misc_feature: Encodes the peptide sequence at SEQ ID NO 1075
acagcatcccaagcattgcaatcaaaagaaaaagcaaaggcgagggtctattttcttcacaaactacaatgggttccgagtctttagtaaccaagagactagatggtaaggtggcactgataactggtggtgccagtggcttaggagagtgttcagccaggctatttctcaaacatggagccaaggttctgattgctgatattcaagacgaattgggccactccctttgccaagagctcggaactgaaaacttcagccatgtccattgtgatgtaacatgcgaatctgatgtcgaaaatgccgtaaacttagcagtctccaagtttggaaaactcgatatcatgttcaacaatgctggccttattggtgatggtgaagtcagagtgacagacgccagcactgacaacttcaagagagtgttcgatatcaatgtcttgggtggtttcttgggagccaagtatgcagccaaggtcatggttccggccaagaaaggttgcattctcttctcgtcgagtatttcttcaaaaatcagcatcggtctgccccatgcatacaaggcatcgaagcatggcgtcgtagggttgacgaagagcttggccgtggagttaggtgagcatggaattagagttaattgcatttcacctcacgcaactgtgaccccattgttccaaacaacactggggttgttcgataagaagaagggagaggagatgattgcggcttcagctgtgttgaaaggcaccgtattggaacctgaagattttgcacatgcagcactgtatttggcaagcgatgaggctaaattcatcagtggtgttaacgtgcctgtcgatggagggtataatctcagtaaccagtcatggaagatgggatttgcagcactttttggataaatcaacaagtcctctattttaatctttgaacaatattttcttcaatagggagaataaaaattacccaagattaaagtacttgtaataaattgtactgtcgatcggtctgtgatgtatgctttcttcatcaatatgcaattatagcacgtgttacctgcagtctctgaggaaaacaagacgtgctaatttgaattttc

SEQ ID NO: 1075 - protein, 274 aa, Gossypium hirsutum
  misc_feature: Ceres CLONE ID no.1931881
  misc_feature: Bit score of 479.9 for HMM based on sequences of FIGURE 8.
  misc_feature (14)..(181): Pfam Name: adh_short Pfam Description: short chain dehydrogenase
  misc_feature: Functional Homolog Of Ceres SEEDLINE ID no. ME18396 at SEQ ID NO. 1012
MGSESLVTKRLDGKVALITGGASGLGECSARLFLKHGAKVLIADIQDELGHSLCQELGTENFSHVHCDVTCESDVENAVNLAVSKFGKLDIMFNNAGLIGDGEVRVTDASTDNFKRVFDINVLGGFLGAKYAAKVMVPAKKGCILFSSSISSKISIGLPHAYKASKHGVVGLTKSLAVELGEHGIRVNCISPHATVTPLFQTTLGLFDKKKGEEMIAASAVLKGTVLEPEDFAHAALYLASDEAKFISGVNVPVDGGYNLSNQSWKMGFAALFG

SEQ ID NO: 1076 - DNA, 930 bp, Populus balsamifera subsp. trichocarpa
  misc_feature: Ceres ANNOT ID no.1480006
  misc_feature: Encodes the peptide sequence at SEQ ID NO 1077
atgctggctcaagtgataccagagcaaacccttcaagttcaagggattgatcatgtcataggcaaggataactcctcatctctctcatataaaaggttggagggaaaagttgcgattataacaggcggtgcaagagggattggagaggccacagtgaaactctttgtgaggcatggagccaaggtagtgattgctgatattgaggatgctaatggtattgctttagctgaatctttatctccttcagcagtttatgtacgttgtgatgtgtgtttagaagaagaaatagaaagtctaatcaacctaacaatttctcaatacggccggctggacattcttttcaacaatgctggagttcttggcaatcaatcaaagcacaaaagcattatcaattttgatgctgatgagtttgataatatcatgagaatcaatgttagaggagctgcccttggcatgaaacatgcagcaagagtcatggtgcctcgacgaagtggctgcgtcatttccacagctagtgtagctggtataattggagggcttggacctcatgcatatacagcttcaaaacatgctattgtagggttaacaaagaacacagcttgtgaattaagcagatatgggattagggttaattgtatatctcctttcggggtggctacttccatgcttgttaatgcatggaggggttgcgaggaagatggagatgatgatgagaaatgcatggattttggtgctccaagcgaggaagaaatggagaagatggaggaacttgtgagagggcttggaaatctaaagggagcaacactaaaagctaaggatattgccgaggctgctctttatcttgctagtgatgaatccaagtatgtaagtggtcacaatcttgttgtagatggtggttttactaccttcaaaaactgcgtaggactgtag

SEQ ID NO: 1077 - protein, 309 aa, Populus balsamifera subsp. trichocarpa
  misc_feature: Ceres ANNOT ID no.1480006
  misc_feature: Bit score of 463.0 for HMM based on sequences of FIGURE 8.
  misc_feature (36)..(204): Pfam Name: adh_short Pfam Description: short chain dehydrogenase
  misc_feature: Functional Homolog Of Ceres SEEDLINE ID no. ME18396 at SEQ ID NO. 1012
MLAQVIPEQTLQVQGIDHVIGKDNSSSLSYKRLEGKVAIITGGARGIGEATVKLFVRHGAKVVIADIEDANGIALAESLSPSAVYVRCDVCLEEEIESLINLTISQYGRLDILFNNAGVLGNQSKHKSIINFDADEFDNIMRINVRGAALGMKHAARVMVPRRSGCVISTASVAGIIGGLGPHAYTASKHAIVGLTKNTACELSRYGIRVNCISPFGVATSMLVNAWRGCEEDGDDDEKCMDFGAPSEEEMEKMEELVRGLGNLKGATLKAKDIAEAALYLASDESKYVSGHNLVVDGGFTTFKNCVGL

SEQ ID NO: 1078 - DNA, 1261 bp, Gossypium hirsutum
  misc_feature: Ceres CLONE ID no.1895007
  misc_feature: Encodes the peptide sequence at SEQ ID NO 1079
cttctccatctctcattgcctcattgtcaccattttctatcaaaacaaactaccctctctttttttttatgtcctttctccatctttaagctaattggctacttaagcttcagtagttaagtttttttagcaaaaaatgggggaaagaagcattaaatccaccatttttttgttgaattagcagtcacctgctcaaacagtgatattgttgaagtgaaactcctgccatggctactagcagcaacaactccatagattcatcactgtccagccaaagattagtggggaaagtggcattggtcactggtggagcaaccggcattggtgagagcattgtgcgtctatttcacaagcatggtgccaaagtctgcattgttgatgtgcaagacaaccttggcctccaagtttgtcaatccctcagcaacggccctaacgtatgttttttccattgcgacgtgacaatagaagaacaagttcggaccgcggttgactacgcagttgaaaagtttggtacactcgatatcatggtcaacaacgccggattatcaggtccaccgtataacgatatccgcaactatgacttatctgatttcgataaagtaatgaatgtgaatgtaaaaggtgttttccttggaatgaagcatgctgctagaattatgatcccacatgaaaagggttcaatcatttcaatctgtagtgtttcaggtgtcatcggtggcctaggacctcatgcatatacaggctctaaacatgctgttttaggccttactaggaatgttgcatctgagttaggtaaatacggaataagagtgaattgtgtttctccgtatgccgttgcaaccgaattggcctttgctcacttgcacgaggacgaaagaaccagcgatgtacgtactggttttcgtgctttcatcgggaaaaacgcgaacctggatggggtggatttgactgtggagcatgtggctaatgctgtgctgttcttagcaagtgatgatgcagggtacataagtggagacaatcttatggttgatggtgggtttacatcttccaatcactcattgcgtgtctttagatgaggattgatgaaaatgtgaaccaaaatgaggctcattagcttagctgcctaagccactagctttggttcaactattaccagattgtatctcccttctattttctcctgtcagtggtatgtaatttgtgacaaaaaaacttctaatataattttaattatattaaacaaaaaaaaaaaaaaaaaaaa

SEQ ID NO: 1079 - protein, 282 aa, Gossypium hirsutum
  misc_feature: Ceres CLONE ID no.1895007
  misc_feature: Bit score of 609.9 for HMM based on sequences of FIGURE 8.
  misc_feature (21)..(189): Pfam Name: adh_short Pfam Description: short chain dehydrogenase
  misc_feature: Functional Homolog Of Ceres SEEDLINE ID no. ME18396 at SEQ ID NO. 1012
MATSSNNSIDSSLSSQRLVGKVALVTGGATGIGESIVRLFHKHGAKVCIVDVQDNLGLQVCQSLSNGPNVCFFHCDVTIEEQVRTAVDYAVEKFGTLDIMVNNAGLSGPPYNDIRNYDLSDFDKVMNVNVKGVFLGMKHAARIMIPHEKGSIISICSVSGVIGGLGPHAYTGSKHAVLGLTRNVASELGKYGIRVNCVSPYAVATELAFAHLHEDERTSDVRTGFRAFIGKNANLDGVDLTVEHVANAVLFLASDDAGYISGDNLMVDGGFTSSNHSLRVFR

SEQ ID NO: 1080 - protein, 284 aa, Ipomoea trifida
  misc_feature: Public GI ID no.3598863
  misc_feature: Bit score of 451.8 for HMM based on sequences of FIGURE 8.
  misc_feature (17)..(184): Pfam Name: adh_short Pfam Description: short chain dehydrogenase
  misc_feature: Functional Homolog Of Ceres SEEDLINE ID no. ME18396 at SEQ ID NO. 1012
MAASSLQLPVFKRLEGKVAIITGAANGIGATTARLFAQHGCKVIIADIDDKNGHSVAEEIGPEYALFIHCDVRIESHVQHAVDTTVSRYGKLDIMFSNAGVAGSRDTSILEASPENINLVFETNVFGAFFCAKHAARVMIPARKGSVIFSASAASEVFGITSDTYTASKCAVVGLCKSLCVEMGKYGIKANCVSPYVILTKLGMSIMPTQDRKLAEEIVAEASNFKGKTLTTEDVAEAALYLAGDESKFVSGLNLLIDGGFTTTNIAFQVAVEKVLGGGEGTTA

SEQ ID NO: 1081 - DNA, 1173 bp, Populus balsamifera subsp. trichocarpa
  misc_feature: Ceres ANNOT ID no.1471735
  misc_feature: Encodes the peptide sequence at SEQ ID NO 1082
atgaataatgattcacccgtcacgtatgttgtcttgcaaatgggccctatagtctcagtgtcaactgtcaacccctcgagtccctttttctctcactgtctctcgtgcttgagcaaaagcttctcacacagaacacctctttgtggttcaaactttctctcccaccaggtgcagtatgttcaagattggattcagaagagcttccatttcaagatcagtttctcttgctcaggtcttcaacaagggattctcctcccagcctggaagataaaaaatactccgaaaaagaataaccagcatgataccaagcatcttcttgcacaagatcctcctccgccacgagaaaagtattttagttcaacttttcactattcaagcaaactagaaggtaaggtagcattgatcactggagcagcaagtggaattggaaaggcaactgcagccaaattcataaaccatggtgccagagttgttattgctgatattcaacaccaactaggccaagaaactgcaaatgaacttgggccagacgctactttcatttcctgtgatgtaactaaagaatctgatgtttccggtgctgttgattttgccatctctaagtacaaccaactggatattttgtacaacaacgcaggggtggcctgcaagagtcctcatagtattgtagaccttgatctagctgtgtttgataggatcatgaatatcaatgtacggggagtaatggctggagttaaacatgcatcgcgtgtgatgatcccacgaaggagtggcgccattctttgcacagctagcatcacaggtctcatgggtgggcttgcgcagcacacctacagcgtctccaagtttgctgttgcaggcattgtcaagtcacttgcagcagagttatgcaagcatgggattcggataaactgcatatcgccctttgctattccaactccatttgtgatggaagaaatgaggcagatatatcctggtgctgatgatgaaaagctcgtggaaattctgtatagaaccggtacattagagggagcaaattgtgagccaaatgatatagctaatgctgcactctaccttgcatccgatgatgccaagtatgttagcggacataatttggtggtagatggaggttttacatcattcaagaatccgatgctccccgcatcaatttag

SEQ ID NO: 1082 - protein, 377 aa, Populus balsamifera subsp. trichocarpa
  misc_feature: Ceres ANNOT ID no.1471735
  misc_feature: Bit score of 388.7 for HMM based on sequences of FIGURE 8.
  misc_feature (118)..(284): Pfam Name: adh_short Pfam Description: short chain dehydrogenase
  misc_feature: Functional Homolog Of Ceres SEEDLINE ID no. ME18396 at SEQ ID NO. 1012
MGPIVSVSTVNPSSPFFSHCLSCLSKSFSHRTPLCGSNFLSHQVQYVQDWIQKSFHFKISFSCSGLQQGILLPAWKIKNTPKKNNQHDTKHLLAQDPPPPREKYFSSTFHYSSKLEGKVALITGAASGIGKATAAKFINHGARVVIADIQHQLGQETANELGPDATFISCDVTKESDVSGAVDFAISKYNQLDILYNNAGVACKSPHSIVDLDLAVFDRIMNINVRGVMAGVKHASRVMIPRRSGAILCTASITGLMGGLAQHTYSVSKFAVAGIVKSLAAELCKHGIRINCISPFAIPTPFVMEEMRQIYPGADDEKLVEILYRTGTLEGANCEPNDIANAALYLASDDAKYVSGHNLVVDGGFTSFKNPMLPASI

SEQ ID NO: 1083 - DNA, 938 bp, Gossypium hirsutum
  misc_feature: Ceres CLONE ID no.1937530
  misc_feature: Encodes the peptide sequence at SEQ ID NO 1084
agcaaatccgagggcctcgctaaaagacttttcagatgtctaacccaaggttggaaggtaaggtggctcttatcactggtggagccagcggtatcggtgaggagacggcgaggttctttgtacaacatggggctttggttgttattgttgatgtccaggatgatctggggaatcaagtcgctgcatcgatcggccttgacaaggttagttaccggcactgcgatgtacgagaggagaagcaggttgaggaagcagtaagtttcacagtggagaaatatgggaagctggatatcttattcagcaatgcgggtaccctaggctcgttaaccggaatcttagaaattgacctggatgactttgacaacaccatagccacgaacgttcgaggggtggccgccacgatcaagcatgccgctcgagctatggtggctaaaaacacacgcggatccatcatatgcactggaagtgtagcatcttttgtaggaggaactggtcccaatggttatacaacatcaaagcatgctatcgtagggcttgttcgaggagcgtgtagtgagctaggggctcatgggatccgagtcaattgcgtttctccctacggagttgccacgccgctcgcttgtagagcctacaattttgaaccaagtcaactggaggccaacagttattcggcaagcaacttgaaaggtattgtgttgaaggctagacacgttgcagagactgtgttatttcttgcttctgatgagtccgcttatattagcggccaaaacttggctgttgatggaggatttactgtggttactcacagtctttcaacatttaccgattaatggttgtggaagccaatttttgatataattctctgtaacatttatcagtaaagtttcttcgacttgcgagtccaaccttattaccagtaaaaaaaaaaaaaaaaaaaa

SEQ ID NO: 1084 - protein, 264 aa, Gossypium hirsutum
  misc_feature: Ceres CLONE ID no.1937530
  misc_feature: Bit score of 412.4 for HMM based on sequences of FIGURE 8.
  misc_feature (9)..(176): Pfam Name: adh_short Pfam Description: short chain dehydrogenase
  misc_feature: Functional Homolog Of Ceres SEEDLINE ID no. ME18396 at SEQ ID NO. 1012
MSNPRLEGKVALITGGASGIGEETARFFVQHGALVVIVDVQDDLGNQVAASIGLDKVSYRHCDVREEKQVEEAVSFTVEKYGKLDILFSNAGTLGSLTGILEIDLDDFDNTIATNVRGVAATIKHAARAMVAKNTRGSIICTGSVASFVGGTGPNGYTTSKHAIVGLVRGACSELGAHGIRVNCVSPYGVATPLACRAYNFEPSQLEANSYSASNLKGIVLKARHVAETVLFLASDESAYISGQNLAVDGGFTVVTHSLSTFTD

SEQ ID NO: 1085 - DNA, 963 bp, Gossypium hirsutum
  misc_feature: Ceres CLONE ID no.1833050
  misc_feature: Encodes the peptide sequence at SEQ ID NO 1086
gtgagcttaacggagaaaacagcagaacccagggggcgccttataaaaaaaagttgtagcaggcaggcaggtaggctcactcagatgtctaagtcaaggttggaaggtaaggtagctcttatcactggtgccgccagcgggattggtgaggagacggtgaggttatttgtggaacatggggcttttgttatcattgctgatgtccaagatgatctcgggaacaaagtcgcggcatccatcggcctagacaaggttagttactgtcactgtgacgtaagagacgagaagcaggtagaggcaacagtgagttacgcggtggagaaatatggaaggctggacattttgttcagcaatgctggtgtctatggaccgttacctgggatcttggaacttgacgttaatggcttcgacaacaccatggccacaaatgttcgaggtgttgcagccacgatcaagcatgccgctcgtgctatggtggctaaaaacatacgcggatccatcatatgcactgcgagtgtagcatcttgtgtaggaggaatcgcaacgattggttatacgacatcgaaacatgctgttgtaggacttgttcgaggagcatgtagtgagctagggggttacgggatcagagtaaattgcgtttctccatttggagtggccacgcctcttgcttgtaaaattttcgatatggaaccaagtgaagtagaggccaatacttgttccaggagcaacttgaaaggtattgtgttgaaggctagacacatttcggaggctgcattgtttcttgcttctgatgaatccgtttacatcagtggccaaaacttggcagttgatggaggcttttcagtggttaattacagttttccagaagttcataactaatgctagtcatcactgttagaacgcaatatttaataaagattggccattaattcggctcctatttaaaaaaaaaaaaaaaaaaaa

SEQ ID NO: 1086 - protein, 264 aa, Gossypium hirsutum
  misc_feature: Ceres CLONE ID no.1833050
  misc_feature: Bit score of 396.6 for HMM based on sequences of FIGURE 8.
  misc_feature (9)..(176): Pfam Name: adh_short Pfam Description: short chain dehydrogenase
  misc_feature: Functional Homolog Of Ceres SEEDLINE ID no. ME18396 at SEQ ID NO. 1012
MSKSRLEGKVALITGAASGIGEETVRLFVEHGAFVIIADVQDDLGNKVAASIGLDKVSYCHCDVRDEKQVEATVSYAVEKYGRLDILFSNAGVYGPLPGILELDVNGFDNTMATNVRGVAATIKHAARAMVAKNIRGSIICTASVASCVGGIATIGYTTSKHAVVGLVRGACSELGGYGIRVNCVSPFGVATPLACKIFDMEPSEVEANTCSRSNLKGIVLKARHISEAALFLASDESVYISGQNLAVDGGFSVVNYSFPEVHN

SEQ ID NO: 1087 - DNA, 1097 bp, Glycine max
  misc_feature: Ceres CLONE ID no.644213
  misc_feature: Encodes the peptide sequence at SEQ ID NO 1088
acatcaacagctttatttccaggttttggggagagttcatccaagcaaggaactcactcattcactcactagtcactaccaatgccgaaacaaaggttggagggtaaggtggctcttatcactggagcagcaagtgggattggagaagagacagtgagattgttcgctgaacatggagcacttattgttgcagcagatattcaagatgaacaaggccaccaagttgcagcttcaatagggtcagagagagtgacctaccaccattgtgatgtgagagatgaaaaccaagttgaagaaacaatcaagttcactttggaaaaacatggtcgcatagatgttttgttcagcaacgcgggaataataggttccttatctgggatccttgaccttgatctgaatgagtttgacaacacaattgccacaaatgttcgcggtgtagccgccacgattaagcacacggcacgtgccatggttgctaaaagcacccgtggatccatcatatgcaccacaagtgtggctgctatgattggtggaactggacctcatggctataccacatcaaaacatgctcttctggggttggtgaaatcagcttgtagtgaacttggtgcttatggaataagagttaatagcatatccccttttggagttgcaacacctcttgcatgcaaagctttcaactttgaacctgagcaagttgaagctaatagctgctcacaggctaatctaaaaggtgttgtgttgaaggctaggcatatagctgaagcagctttgtttcttgcttctgatgatgctgtttacatcagtggtcacaacttggtggtggatggtggcttctctatggttaatagaagttattccttcacaccagcttaattacatgtagagccaaaaaaactatagttttgtggctgattggcattaatttctttatcctcatcaagtagagaacatatatgatgtcatgcagtgcgtcaaattaccttgttactgggactttttttttttcatttgcactctactaataattctgcagtgtatcttctttgtttgtattttcaaagcataaattcatcaaccttgtctgcttgtgaccc

SEQ ID NO: 1088 - protein, 264 aa, Glycine max
  misc_feature: Ceres CLONE ID no.644213
  misc_feature: Bit score of 379.8 for HMM based on sequences of FIGURE 8.
  misc_feature (9)..(176): Pfam Name: adh_short Pfam Description: short chain dehydrogenase
  misc_feature: Functional Homolog Of Ceres SEEDLINE ID no. ME18396 at SEQ ID NO. 1012
MPKQRLEGKVALITGAASGIGEETVRLFAEHGALIVAADIQDEQGHQVAASIGSERVTYHHCDVRDENQVEETIKFTLEKHGRIDVLFSNAGIIGSLSGILDLDLNEFDNTIATNVRGVAATIKHTARAMVAKSTRGSIICTTSVAAMIGGTGPHGYTTSKHALLGLVKSACSELGAYGIRVNSISPFGVATPLACKAFNFEPEQVEANSCSQANLKGVVLKARHIAEAALFLASDDAVYISGHNLVVDGGFSMVNRSYSFTPA

SEQ ID NO: 1089 - DNA, 1210 bp, Triticum aestivum
  misc_feature: Ceres CLONE ID no.568154
  misc_feature: Encodes the peptide sequence at SEQ ID NO 1090
aaaccagcaagcttcacacacttccttccttcctgttgtggctcctgtacatgcgcgctagcctcgcctcgtacgcgcaagacctcgccatgcctgccttggacgtcatgccggagaaggcccaccacccggccatgtcgccgtcgcaccacggccacgggtgggacgccagcggcgcccccacccccatgcacaagaggctggacggcaaggtggccattgtcaccggcggcgcgcggggcatcggggaggccatcgtcaggctcttcgtcaagcacggcgccaaggtggtcatcgcggacatcgacgacgccgccggcgaggcgctggccgcctcgctcggcccgcacgtcgccttcgtgcgctgcgacgtgtccgtggaggaggacgtggagcgcgccgtcgaccgcgccgtgtcgcgctacggccgcctcgacgtcttctgcaacaacgccggggtgctgggccgccagaccagcgccgccaagagcatcctcacgttcgacgccggcgagttcgaccgcgtgctccgcgtcaacgcgctgggcaccgcgctcggcatgaagcacgccgggcgcgccatgatggcccgccgctacggcagcatcgtctccatcgccagcgtcgccggcgtgctcggcggcctcggcccgcacgcatacaccgcctccaagcacgccatcgtggggctcaccaagaacgccgcctgcgagctgggcgcgcacggcatccgcgtcaactgcgtctcgcccttcggcgtcgccaccccaatgctcatcaacgcgtggcgccagggccacgacgcgtccgccgccgacgacgccgacgccgacatcggcctcgacgtggccgcgccgagcgaccaggaggtggagaagatggaggaggtggtgaggagcctcgccacgctcaaggggtccaccctcaggcccagggacatcgccgaggcggtgctcttcctggccagcgacgactccagatacgtgtccggccacaacctcgtggtggacggcggcgtcaccacctcaagaaacttgatcgggctgtgaaaatcgcatggccgacctcgcatcaaggcacctacgtaatgtagatcagtaggaggaacaaggacgattgtttagtctgcaataactgtacgcaagttctttggttggttcggttaattggttgattgattcagtgtgctattcgaaaaaaaaaaaaaaaa

SEQ ID NO: 1090 - protein, 332 aa, Triticum aestivum
  misc_feature: Ceres CLONE ID no.568154
  misc_feature: Bit score of 423.9 for HMM based on sequences of FIGURE 8.
  misc_feature (54)..(223): Pfam Name: adh_short Pfam Description: short chain dehydrogenase
  misc_feature: Functional Homolog Of Ceres SEEDLINE ID no. ME18396 at SEQ ID NO. 1012
MRASLASYAQDLAMPALDVMPEKAHHPAMSPSHHGHGWDASGAPTPMHKRLDGKVAIVTGGARGIGEAIVRLFVKHGAKVVIADIDDAAGEALAASLGPHVAFVRCDVSVEEDVERAVDRAVSRYGRLDVFCNNAGVLGRQTSAAKSILTFDAGEFDRVLRVNALGTALGMKHAGRAMMARRYGSIVSIASVAGVLGGLGPHAYTASKHAIVGLTKNAACELGAHGIRVNCVSPFGVATPMLINAWRQGHDASAADDADADIGLDVAAPSDQEVEKMEEVVRSLATLKGSTLRPRDIAEAVLFLASDDSRYVSGHNLVVDGGVTTSRNLIGL

SEQ ID NO: 1091 - DNA, 999 bp, Glycine max
  misc_feature: Ceres CLONE ID no.527598
  misc_feature: Encodes the peptide sequence at SEQ ID NO 1092
atccttcacgaccacataagcaattaattaagcactctaaaacatatatttatttccttgtctacatatatcttgaaaaactcaatcatggctagtgtttcttcggtttcagctccatttagaaggcttgaggggaaggtggcgattatcactggtggtgcgagtggtctaggtgcagccactgcaagactcttctctaagcatggagcacatgtagtcatagctgatattcaagacgacttgggtctctctgttgccaaagagttagaatccgcttcctatgtccattgcgatgtcacaaacgaaaacgacgttgaaaactgtgtgaacacagcggtttccaagtatggcaaactcgatatcatgtttaataatgctggcataattgatgagatcaaaacaagcatagttgacaacagcaagtctgattttgagagagtgataggtgttaacttggttggtccttttctgggaacaaagcatgctgcaagggtcatgattcctgctaaaaagggatgcataatcaacacagctagtgttgctggatgcataggtggaggtgctacacatgcctacacaagttcaaagcacgcactaattgggctgacaaaaaacactgcggtggagcttggacaacatggtattagggtaaattgtttgtctccttatcttgttgtcacaccattaagtaagaaatatttcaatattgatgaagacaaaattcgtgagatatattcaaacctaaaaggtgctcatcttgtgcctaacgatgtggccgaagctgctctttacttggcaggtgatgagtccaagtatgttagtggtcacaatcttgtgatagatggagggtacactgatgtaaatgcaggatttaccgtgtttgggcagtctcagtaaaaattgtctgtgtctttaaagtttaaataattattgttggtgtttgaagtgtctgtgtttcgatggccctgtagttcagaaacttgagctgttagcatgtgt

SEQ ID NO: 1092 - protein, 269 aa, Glycine max
  misc_feature: Ceres CLONE ID no.527598
  misc_feature: Bit score of 673.8 for HMM based on sequences of FIGURE 8.
  misc_feature (17)..(182): Pfam Name: adh_short Pfam Description: short chain dehydrogenase
  misc_feature: Functional Homolog Of Ceres SEEDLINE ID no. ME18396 at SEQ ID NO. 1012
MASVSSVSAPFRRLEGKVAIITGGASGLGAATARLFSKHGAHVVIADIQDDLGLSVAKELESASYVHCDVTNENDVENCVNTAVSKYGKLDIMFNNAGIIDEIKTSIVDNSKSDFERVIGVNLVGPFLGTKHAARVMIPAKKGCIINTASVAGCIGGGATHAYTSSKHALIGLTKNTAVELGQHGIRVNCLSPYLVVTPLSKKYFNIDEDKIREIYSNLKGAHLVPNDVAEAALYLAGDESKYVSGHNLVIDGGYTDVNAGFTVFGQSQ

SEQ ID NO: 1093 - protein, 267 aa, Vigna unguiculata
  misc_feature: Public GI ID no.1853968
  misc_feature: Bit score of 697.5 for HMM based on sequences of FIGURE 8.
  misc_feature (17)..(182): Pfam Name: adh_short Pfam Description: short chain dehydrogenase
  misc_feature: Functional Homolog Of Ceres SEEDLINE ID no. ME18396 at SEQ ID NO. 1012
MANGSVLSPVVKRLEGKVAIITGGASGIGEATARLFSQHGAHVVVADIQDDVGLSLCNELKSAIYVHCDVTKEEDIEKCVDTAVSKFGKLDIMFNNAGTGDEFKKSILDNTKSDFERVISVNLVGPFLGTKHAARVMIPARRGCIINTASVAGCIGGGATHAYTSSKHALVGLTKNTAVELGQFGIRVNCVSPFAIVTPLLNKYFNLDEEGVRKTYMNLKGWYPVPNDVAEAALYLASDESKFVSSHNLVIDGGLINSNVGFPMFEM

SEQ ID NO: 1094 - protein, 274 aa, Phaseolus lunatus
  misc_feature: Public GI ID no.27530032
  misc_feature: Bit score of 670.2 for HMM based on sequences of FIGURE 8.
  misc_feature (17)..(182): Pfam Name: adh_short Pfam Description: short chain dehydrogenase
  misc_feature: Functional Homolog Of Ceres SEEDLINE ID no. ME18396 at SEQ ID NO. 1012
MAHVSAVSAAVKRLEGKVAIITGGASGIGAATARLFSEHGAHVVIADIQDDLGLSVCNELKSAVYVHCDVTKEEDVEKCVNVTVSKYGKLDIMLNNAGTCHELKDSIVDNITSEFERVISVNVVGPFLGTKHAARVMIPAKRGCIINTSSIAGCRGTGSPHAYVVSKHGLEGLTKNTAVELGQFGIRVNCVSPYLVATPMLKKYFNLDEEGVREAYSNLKGSYLVPNDVAEAALFLAGDESNYVSGHSLLLDGGYTITNAGFSPNAGFSPGQSE

SEQ ID NO: 1095 - DNA, 816 bp, Populus balsamifera subsp. trichocarpa
  misc_feature: Ceres ANNOT ID no.1487614
  misc_feature: Encodes the peptide sequence at SEQ ID NO 1096
atgggaagtgtttcgctagtctctgcagccctaagaaggctagaaggcaaggtggcactgatcactggaggatcaagtggcataggagagtccactgcaagactcttcgtcaaacatggagctaaggtggtaattgcagacattcaagatgaattgggccactccgtttgcaaggaattagaacctgaacctgcttcattcatccattgtgatgttactcaagaaaaagatgttgaaaacgctgttaatacagctgtttctaagtatggaaagcttgacatcatgttcaacaacgcaggtacaggaggaacgccaaaaacaaacataattgaaaatgacaaggccgaatttgagaagatcatttgtgccaatttagtaggtgcattcttaggcactaagcatgcagcccgtgtaatgatccctgctcggcgcggtagcataattacaactgcaagtgtttgtgcaataattggaggaggttcatcacatgcctacactagttcaaagcatggtgtgttaggattaatgagaaacacggctgtggaattaggacaatatggcatccgtgtaaattgtgtgtcaccgtacgcggttcctaccccattgtttaagaatttctttaagatgaacgacgatgaagttagttgcatttactctaacctcaaggaagctgtgcttgaagcagaagacattgctgaggctgctctttatttggggagtgatgaatcaaagtatgttagtggacacaatctggtggtagatggtggcttcactattgtaaatccaggtttttgcatgtttccacgatctagctga

SEQ ID NO: 1096 - protein, 271 aa, Populus balsamifera subsp. trichocarpa
  misc_feature: Ceres ANNOT ID no.1487614
  misc_feature: Bit score of 635.5 for HMM based on sequences of FIGURE 8.
  misc_feature (17)..(184): Pfam Name: adh_short Pfam Description: short chain dehydrogenase
  misc_feature: Functional Homolog Of Ceres SEEDLINE ID no. ME18396 at SEQ ID NO. 1012
MGSVSLVSAALRRLEGKVALITGGSSGIGESTARLFVKHGAKVVIADIQDELGHSVCKELEPEPASFIHCDVTQEKDVENAVNTAVSKYGKLDIMFNNAGTGGTPKTNIIENDKAEFEKIICANLVGAFLGTKHAARVMIPARRGSIITTASVCAIIGGGSSHAYTSSKHGVLGLMRNTAVELGQYGIRVNCVSPYAVPTPLFKNFFKMNDDEVSCIYSNLKEAVLEAEDIAEAALYLGSDESKYVSGHNLVVDGGFTIVNPGFCMFPRSS

SEQ ID NO: 1097 - DNA, 918 bp, Populus balsamifera subsp. trichocarpa
  misc_feature: Ceres ANNOT ID no.1541881
  misc_feature: Encodes the peptide sequence at SEQ ID NO 1098
atggctatattagggaagtatcatgtgctaggaaaacacagagagtggctaccaggggagctggtactgattcatggggagtgtttcacttgtctcagcagccctaagaaggtaacgaaagctttttgctggtgttgtaggctagaaggcaaggtggcattgatcactggagggtctagtggcataggagagtccgctgctagactgttcgccaaacatggagctaaagtggtgattgcagacgttcaagatgaactaggccactctgtttgcgaagaattgaagactgaatcagcctcattcgtccactgtgatgttactcaagaaaaagatgttgaaaatgctgttaacacagctgtttctaagcatggaaagctggacatcatgttcaataatgcaggaatagtaggcacgccaaaaccaaacatacttgacaatgacaaggctgaatttgagaaggtcattagtgttaatgtcgtgggcgcattcttaggcactaagcacgcagcccgcgtaatgatccctgttcggcgaggtagcataatctcaaccgctagcgtttgcggaacaattggaggtgttgcatcacatgcctacacaagttcaaagcatggcgtgatagggttaatgagaaacacagctgtggagttagggcagcatggcatccgtgtaaattgcgtgtcgccctacgttgttttgaccccattggtgaaggatttctttaagctggatgatgatgaagtaaatcgtctttactctaatctgaaagaagcagttctgaaagcagaagacattgcggaggctgctctttttctggggagtgatgagtccaagtatgttagtggacataatttgattgtagacgggggcttcaccattgttaatccaggtttttgtatgtttccacaatctatttga

SEQ ID NO: 1098 - protein, 305 aa, Populus balsamifera subsp. trichocarpa
  misc_feature: Ceres ANNOT ID no.1541881
  misc_feature: Bit score of 625.3 for HMM based on sequences of FIGURE 8.
  misc_feature (51)..(218): Pfam Name: adh_short Pfam Description: short chain dehydrogenase
  misc_feature: Functional Homolog Of Ceres SEEDLINE ID no. ME18396 at SEQ ID NO. 1012
MAILGKYHVLGKHREWLPGELVLIHGECFTCLSSPKKVTKAFCWCCRLEGKVALITGGSSGIGESAARLFAKHGAKVVIADVQDELGHSVCEELKTESASFVHCDVTQEKDVENAVNTAVSKHGKLDIMFNNAGIVGTPKPNILDNDKAEFEKVISVNVVGAFLGTKHAARVMIPVRRGSIISTASVCGTIGGVASHAYTSSKHGVIGLMRNTAVELGQHGIRVNCVSPYVVLTPLVKDFFKLDDDEVNRLYSNLKEAVLKAEDIAEAALFLGSDESKYVSGHNLIVDGGFTIVNPGFCMFPQSI

SEQ ID NO: 1099 - DNA, 1125 bp, Populus balsamifera subsp. trichocarpa
  misc_feature: Ceres ANNOT ID no.1488465
  misc_feature: Encodes the peptide sequence at SEQ ID NO 1100
atggctatattagggaagtatcatgtgctaggaaaacacagagagtggctaccaggggagctggtactgattcatggggagtgtttcacttgtctcagcagccctaagaaggtaacgaaagctttttgctggtgttgtaggctagaaggcaaggtggcattgatcactggagggtctagtggcataggagagtccgctgctagactgttcgccaaacatggagctaaagtggtgattgcagacgttcaagatgaactaggccactctgtttgcgaagaattgaagactgaatcagcctcattcgtccactgtgatgttactcaagaaaaagatgttgaaaatgctgttaacacagctgtttctaagcatggaaagctggacatcatgttcaataatgcaggaatagtaggcacgccaaaaccaaacatacttgacaatgacaaggctgaatttgagaaggtcattagtgttaatgtcgtgggcgcattcttaggcactaagcacgcagcccgcgtaatgatccctgttcggcgaggtagcataatctcaaccgctagcgtttgcggaacaattggaggtgttgcatcacatgcctacacaagttcaaagcatggcgtgatagggttaatgagaaacacagctgtggagttagggcagcatggcatccgtgtaaattgcgtgtcgccctacgttgttttgaccccattggtgaaggatttctttaagctggatgatgatgaagtaaatcgtctttactctaatctgaaagaagcagttctgaaagcagaagacattgcggaggctgctctttttctggggagtgatgagtccaagtatgttagtggacataatttgattgtagacgggggcttcaccattgttaatccagatattgatatacgccgtgctgagtttgatatattttcacatcagtgttctgtttttaagcacaaagcagagaaagagaagtgtcttgggacttgggagagcggacaaaatcctgtagtcttgggacttgttcaatttctaaaatctatggagtgtggaccaccaaaaggcaaaattttcaacaaaggaataagagaggacaaaaccctaaaggccaaattctcaacaaaggaataa

SEQ ID NO: 1100 - protein, 374 aa, Populus balsamifera subsp. trichocarpa
  misc_feature: Ceres ANNOT ID no.1488465
  misc_feature: Bit score of 608.6 for HMM based on sequences of FIGURE 8.
  misc_feature (51)..(218): Pfam Name: adh_short Pfam Description: short chain dehydrogenase
  misc_feature: Functional Homolog Of Ceres SEEDLINE ID no. ME18396 at SEQ ID NO. 1012
MAILGKYHVLGKHREWLPGELVLIHGECFTCLSSPKKVTKAFCWCCRLEGKVALITGGSSGIGESAARLFAKHGAKVVIADVQDELGHSVCEELKTESASFVHCDVTQEKDVENAVNTAVSKHGKLDIMFNNAGIVGTPKPNILDNDKAEFEKVISVNVVGAFLGTKHAARVMIPVRRGSIISTASVCGTIGGVASHAYTSSKHGVIGLMRNTAVELGQHGIRVNCVSPYVVLTPLVKDFFKLDDDEVNRLYSNLKEAVLKAEDIAEAALFLGSDESKYVSGHNLIVDGGFTIVNPDIDIRRAEFDIFSHQCSVFKHKAEKEKCLGTWESGQNPVVLGLVQFLKSMECGPPKGKIFNKGIREDKTLKAKFSTKE

SEQ ID NO: 1101 - DNA, 828 bp, Populus balsamifera subsp. trichocarpa
  misc_feature: Ceres ANNOT ID no.1488468
  misc_feature: Encodes the peptide sequence at SEQ ID NO 1102
atgggaagtgtctcgctactttctacagttgcaagaaggctagaaggtaaagtggcgttgatcaccggtggggctcgtggcattggagagtcaactgcaagacacttcttcaaacatggagcaaaagtagtgattgcagatactcaagatgagttggctcattctgtttgcaaagatttgaactctgaatctgcttcttttatccattgtgacgttacaaaagaaacagatgtagaaaatgcagtgaacacagccatttcaaggcatggcaagctagacgttatgttcaataatgctggcattgtaggagtggtgaaaaccaacatggttgatgtttccatgtctgaattcgaggaagtcattagggttaacctagtaggtgctttcctgggcactaaacatgcagctcgtgtgatgaagcctgctcgacaaggcagcatcataacaacctctagtgtttgtggtattctgggaggttttgcatcccatgcctacacaagttcaaagcatggcgtgttagggctaatgagaaatgcagctgttgagcttggacaatttggcattcgtgtaaattgcgtctccccgtacactgttgcaactgaaatgtcaagaaatttcttgaagatgactgatgatgaaattcgcagtggttattctaaccttaagggggcaattctgacgcctgaagatgtggctgaagcagctctctacttggcaagtgaggactccagatatgtgagcggccacaatctcgtggtagatggcggccacaccatcgtaaataatggttcttgtatgtatgataacccaagtgtgtatggtctctga

SEQ ID NO: 1102 - protein, 275 aa, Populus balsamifera subsp. trichocarpa
  misc_feature: Ceres ANNOT ID no.1488468
  misc_feature: Bit score of 585.8 for HMM based on sequences of FIGURE 8.
  misc_feature (17)..(184): Pfam Name: adh_short Pfam Description: short chain dehydrogenase
  misc_feature: Functional Homolog Of Ceres SEEDLINE ID no. ME18396 at SEQ ID NO. 1012
MGSVSLLSTVARRLEGKVALITGGARGIGESTARHFFKHGAKVVIADTQDELAHSVCKDLNSESASFIHCDVTKETDVENAVNTAISRHGKLDVMFNNAGIVGVVKTNMVDVSMSEFEEVIRVNLVGAFLGTKHAARVMKPARQGSIITTSSVCGILGGFASHAYTSSKHGVLGLMRNAAVELGQFGIRVNCVSPYTVATEMSRNFLKMTDDEIRSGYSNLKGAILTPEDVAEAALYLASEDSRYVSGHNLVVDGGHTIVNNGSCMYDNPSVYGL

SEQ ID NO: 1103 - DNA, 894 bp, Populus balsamifera subsp. trichocarpa
  misc_feature: Ceres ANNOT ID no.1541884
  misc_feature: Encodes the peptide sequence at SEQ ID NO 1104
atgggaagtgtctcgctactttctacagttgcaagaaggctagaaggtaaagtggcgttgatcaccggtggggctcgtggcattggagagtcaactgcaagacacttcttcaaacatggagcaaaagtagtgattgcagatactcaagatgagttggctcattctgtttgcaaagatttgaactctgaatctgcttcttttatccattgtgacgttacaaaagaaacagatgtagaaaatgcagtgaacacagccatttcaaggcatggcaagctagacgttatgttcaataatgctggcattgtaggagtggtgaaaaccaacatggttgatgtttccatgtctgaattcgaggaagtcattagggttaacctagtaggtgctttcctgggcactaaacatgcagctcgtgtgatgaagcctgctcgacaaggcagcatcataacaacctctagtgtttgtggtattctgggaggttttgcatcccatgcctacacaagttcaaagcatggcgtgttagggctaatgagaaatgcagctgttgagcttggacaatttggcattcgtgtaaattgcgtctccccgtacactgttgcaactgaaatgtcaagaaatttcttgaagatgactgatgatgaaattcgcagtggttattctaaccttaagggggcaattctgacgcctgaagatgtggctgaagcagctctctacttggcaagtgaggactccagatatgtgagcggccacaatctcgtggtagatggcggccacaccatcgtaaataatggttcttgtatgtatgataacccaagtgttgatcatgaattgagattcatatatatatatatatatatatatatatatatatatatatatataatttgctttttatga

SEQ ID NO: 1104 - protein, 297 aa, Populus balsamifera subsp. trichocarpa
  misc_feature: Ceres ANNOT ID no.1541884
  misc_feature: Bit score of 586.8 for HMM based on sequences of FIGURE 8.
  misc_feature (17)..(184): Pfam Name: adh_short Pfam Description: short chain dehydrogenase
  misc_feature: Functional Homolog Of Ceres SEEDLINE ID no. ME18396 at SEQ ID NO. 1012
MGSVSLLSTVARRLEGKVALITGGARGIGESTARHFFKHGAKVVIADTQDELAHSVCKDLNSESASFIHCDVTKETDVENAVNTAISRHGKLDVMFNNAGIVGVVKTNMVDVSMSEFEEVIRVNLVGAFLGTKHAARVMKPARQGSIITTSSVCGILGGFASHAYTSSKHGVLGLMRNAAVELGQFGIRVNCVSPYTVATEMSRNFLKMTDDEIRSGYSNLKGAILTPEDVAEAALYLASEDSRYVSGHNLVVDGGHTIVNNGSCMYDNPSVDHELRFIYIYIYIYIYIYIYIICFL

SEQ ID NO: 1105 - DNA, 825 bp, Populus balsamifera subsp. trichocarpa
  misc_feature: Ceres ANNOT ID no.1454972
  misc_feature: Encodes the peptide sequence at SEQ ID NO 1106
atgacaacaacaggatttatctcttcagttgctagaaggctggaaggaaaagtagccttaatcactggaggagccagcggcattggagaatgcacagctaaagtgtttgcccaccacggtgccaaagtggtcgttgctgacatccaagatgaatcgggtcgttcacttgctaaagccctaggtccatcaaactctacctatgtgcactgtgacgtaactgatgaggcccaagtaaaaaatgcagtgaacgccgctgtcacaacttatggcaagctagacataatgttcaacaatgccggcattgctgatgagagcaaagcacgcataattgacaatgaaaaggttgattttgaacgtgttctgcagactaatgtgacgggagtttttcttggcatcaaacatgcagcccgtgtcatgatcccgggacgcaatggtaccataatttcaactgccagtgttagctcaaaagttggtgctgctgcctcacatgcatattgttgctccaagcatgctgttctaggactcaccaaaaatgctgctgttgagcttgggcaatttggcatcagagtgaactgtttatcaccttatgcgcttgcaacccctttagcaaaacaagttattggtcttgatgatgaacaacttgagaatttgatgcacgcttttggtaccctaaagggtgtgacccttcaggcagaagatgtagccaacgcagcactttatctggcaagtgatgaagctagatatgtcagtgggcacaatttattcatagatgggggttttaccattcagaacccatcattccgcatgttccagtatcctgaatag

SEQ ID NO: 1106 - protein, 274 aa, Populus balsamifera subsp. trichocarpa
  misc_feature: Ceres ANNOT ID no.1454972
  misc_feature: Bit score of 639.7 for HMM based on sequences of FIGURE 8.
  misc_feature (17)..(184): Pfam Name: adh_short Pfam Description: short chain dehydrogenase
  misc_feature: Functional Homolog Of Ceres SEEDLINE ID no. ME18396 at SEQ ID NO. 1012
MTTTGFISSVARRLEGKVALITGGASGIGECTAKVFAHHGAKVVVADIQDESGRSLAKALGPSNSTYVHCDVTDEAQVKNAVNAAVTTYGKLDIMFNNAGIADESKARIIDNEKVDFERVLQTNVTGVFLGIKHAARVMIPGRNGTIISTASVSSKVGAAASHAYCCSKHAVLGLTKNAAVELGQFGIRVNCLSPYALATPLAKQVIGLDDEQLENLMHAFGTLKGVTLQAEDVANAALYLASDEARYVSGHNLFIDGGFTIQNPSFRMFQYPE

SEQ ID NO: 1107 - DNA, 831 bp, Populus balsamifera subsp. trichocarpa
  misc_feature: Ceres ANNOT ID no.1475186
  misc_feature: Encodes the peptide sequence at SEQ ID NO 1108
atgtcaaccactgcgtttatctccaccatagccagaaggctacaaggaaaggtagccttaatcaccggcggtgctagtggtattggtgaatgcaccgcaaaagtcttctctcaccatggagctaaagtagtaattgctgatatccaagacgaattaggccattcagttgtcgaggccctaggcccttcaaactccacctacgtgcgttgcgatgtcaccgaagaggcccagataaaaaatgctgtggacaaagctatctcaacctatggcaagctagatataatgctcaacaatgctggcattgctgatgacagtaaagcacgcataatcgacaacgaaatggctgattttgaacgtgttcttaagattaacgtgaccggagttttcctcggcatcaagcacgccgcccgcgtcatgatcccagcacgcagtggcaccataatttcaactgctagtgtaagctcactacttggtgcggcagcttcacatgcatactgttgctcaaaacatgctgtgttaggactgacaagaaatgctgcagctgagcttggacagtttggcattagggtgaattgcttatctccttacgcactcgcaactcctttagcaaggaaatttattggggttgatgatgatgaggcgcttgaaattgcgatgaattcatttgctaatctaaagggagtgacccttaagacggaagatgttgccaatgcagctctttatctagccagtgatgaggctaggtatattagtgggcataatttatttatagatggagggttcagcgttcaaaacccgacattccagatgtttcagtatccagattcttga

SEQ ID NO: 1108 - protein, 276 aa, Populus balsamifera subsp. trichocarpa
  misc_feature: Ceres ANNOT ID no.1475186
  misc_feature: Bit score of 673.3 for HMM based on sequences of FIGURE 8.
  misc_feature (17)..(184): Pfam Name: adh_short Pfam Description: short chain dehydrogenase
  misc_feature: Functional Homolog Of Ceres SEEDLINE ID no. ME18396 at SEQ ID NO. 1012
MSTTAFISTIARRLQGKVALITGGASGIGECTAKVFSHHGAKVVIADIQDELGHSVVEALGPSNSTYVRCDVTEEAQIKNAVDKAISTYGKLDIMLNNAGIADDSKARIIDNEMADFERVLKINVTGVFLGIKHAARVMIPARSGTIISTASVSSLLGAAASHAYCCSKHAVLGLTRNAAAELGQFGIRVNCLSPYALATPLARKFIGVDDDEALEIAMNSFANLKGVTLKTEDVANAALYLASDEARYISGHNLFIDGGFSVQNPTFQMFQYPDS

SEQ ID NO: 1109 - DNA, 1225 bp, Gossypium hirsutum
  misc_feature: Ceres CLONE ID no.1834483
  misc_feature: Encodes the peptide sequence at SEQ ID NO 1110
aaaaaaccgcttttgaagcagaaaagtcattataggaaagcatggcagctgcttcatctttcatctcactactcacaaagaggctggaagtgaaggtagcactaattacaggaggagctagtggtattgggaaatgcactgctaaagtgtttgcacagcatggagccaaagttgtaattgctgatatccaagatgatttaggtcatcgggtttgtgaggacataggcccttcaaactgttcctacgtgcattgcaacgtcactgatgaagaccaaataaaaaatgctgttgacaaagccgtcgccactcacggaaagttggacatcatgttcaacaacgccggcatcgttgatcccaacaagagtcgcataatggacaacgacaaatcagatttcgagcgtgttcttagtgttaacgtaactggcgttttcctggggattaagcacgcagctagggtgatggttccttctcgaagtggtagcataatttcgacatccagcgtaagctccctgatcggtgctaccgccacacatgcttattgtgcttcaaagcatgcagtgctaggactaactaggaatgctgcagtggagctggggcaatttgggatccgagtgaactgcttgtctccctacgctctggcaacacctttagcgacgggattcctgggaggtaatgatgaggagctggagaaagcgatgagtaagtcagctaacctaaagggtgtgtatcttaaggccgaagatatagcaaatgcagcactctacccagcaagtgaggagggaagatatgtcagtgggcataatctgttcatagatgggggctttactgttgtcaatccgtcgctccaaatgttccaataccctgacggctcttgagaacaatattctgctcagcaaatgcttgtccatcttttatagatataaatgacgatcatccatgcattaaaaataatggataaattcctaaaaaataatgattgaataagaacttaatttagagtaattttgggctcttgatacaagtttaatcatagtttataagcatatcttgctaaaagtagtttctctactatactctaatttgtagtttggtccctctattggaaaagtaagcaagcatattgatgtatgtcagagggacgatgcatctgttatatttgaatgtttcttggaaaagtttgaagcaaaattattattattattattaaaaaaaaaaaaaaaaaaaa

SEQ ID NO: 1110 - protein, 277 aa, Gossypium hirsutum
  misc_feature: Ceres CLONE ID no.1834483
  misc_feature: Bit score of 712.1 for HMM based on sequences of FIGURE 8.
  misc_feature (18)..(185): Pfam Name: adh_short Pfam Description: short chain dehydrogenase
  misc_feature: Functional Homolog Of Ceres SEEDLINE ID no. ME18396 at SEQ ID NO. 1012
MAAASSFISLLTKRLEVKVALITGGASGIGKCTAKVFAQHGAKVVIADIQDDLGHRVCEDIGPSNCSYVHCNVTDEDQIKNAVDKAVATHGKLDIMFNNAGIVDPNKSRIMDNDKSDFERVLSVNVTGVFLGIKHAARVMVPSRSGSIISTSSVSSLIGATATHAYCASKHAVLGLTRNAAVELGQFGIRVNCLSPYALATPLATGFLGGNDEELEKAMSKSANLKGVYLKAEDIANAALYPASEEGRYVSGHNLFIDGGFTVVNPSLQMFQYPDGS

SEQ ID NO: 1111 - DNA, 901 bp, Triticum aestivum
  misc_feature: Ceres CLONE ID no.686198
  misc_feature: Encodes the peptide sequence at SEQ ID NO 1112
agggtagtataccagtacaagttaatcaaggttagctcccatggcaagcagctccgatgtcgttcctgccgctgcaaggaagctggacggcaaggtggcgctgatcaccggcggcgcgagcggcatcggcgagggcacggcgcggctgttcgtgcagcacggggccagcgtcgtcctcgccgacatccaggacgacctcggcgcgcgcctctgcgcggagctcggcccggcggcctccagctacgtgcggtgcgacgtcaccaaagaggaggacgtcgcggcggccgtcgaccacaccatcgccaggttcgggaagctggacatcatgttcaacaacgccggcatcggcggtgcggcatgccacagcatccgggacagcaccaaggaggacttcgagcgcgtgctggccgtcaacctcgtggggcccttcctgggtaccaagcacgcggcgcgggtcatggtgcccgcgcggcaaggctgcatcatcgggacgtcgagcctggcgtcggcggtgggcggcgtggcgtcgcacgcgtacacgtgcgccaagcgcgccctggtcgggctgacggagaacgcggcgacggagcttggccagcatggaatccgcgtcaactgcatctccccggcggcggctgccacgccgctggccacgggctacgtggggcttgacggcgaggcgttcgagatggccatggagtcctttgctaacctcaagggcgtgggactgcgggtcaaggacatcgccgccgccgtgctctttctcgccagcgatgacgcgcgctacgtgagcggccacaacctgctcatcgacggcggcatctccgtctcaaaccttaccttcggcatcttcaaggagtaatggaaaccgatcgattctaaactaaaaaaaaaaaaaaaa

SEQ ID NO: 1112 - protein, 273 aa, Triticum aestivum
  misc_feature: Ceres CLONE ID no.686198
  misc_feature: Bit score of 551.2 for HMM based on sequences of FIGURE 8.
  misc_feature (18)..(185): Pfam Name: adh_short Pfam Description: short chain dehydrogenase
  misc_feature: Functional Homolog Of Ceres SEEDLINE ID no. ME18396 at SEQ ID NO. 1012
MASSSDVVPAAARKLDGKVALITGGASGIGEGTARLFVQHGASVVLADIQDDLGARLCAELGPAASSYVRCDVTKEEDVAAAVDHTIARFGKLDIMFNNAGIGGAACHSIRDSTKEDFERVLAVNLVGPFLGTKHAARVMVPARQGCIIGTSSLASAVGGVASHAYTCAKRALVGLTENAATELGQHGIRVNCISPAAAATPLATGYVGLDGEAFEMAMESFANLKGVGLRVKDIAAAVLFLASDDARYVSGHNLLIDGGISVSNLTFGIFKE

SEQ ID NO: 1113 - protein, 270 aa, Lactuca sativa
  misc_feature: Public GI ID no.84579418
  misc_feature: Bit score of 681.6 for HMM based on sequences of FIGURE 8.
  misc_feature (11)..(178): Pfam Name: adh_short Pfam Description: short chain dehydrogenase
  misc_feature: Functional Homolog Of Ceres SEEDLINE ID no. ME18396 at SEQ ID NO. 1012
MTSITKRLEGKVALITGAASGIGECTAKLFAEHGAKVVIADIQDQLGQAVCEAIGTSNSIYVHCDVTNEEDIKNAVDTAVTTYGKLDIMFNNAGVVDPIKARIIDNEKTNFERVLNVNVTGVFLCMKHAARVMVPQRSGTIISSSSLSSHLGGIASHAYCCSKHAIAGLTKNLAVELGQFGIRVNCLSAYGIATPLTKKITGLEKEAFESAMNLTANLKGVTLKTDDAAYAALFLVSDEAKYISGQNLLIDGGLSYANTSFNFFKYGEEL

SEQ ID NO: 1114 - protein, 271 aa, Lactuca sativa
  misc_feature: Public GI ID no.84579420
  misc_feature: Bit score of 637.6 for HMM based on sequences of FIGURE 8.
  misc_feature (11)..(178): Pfam Name: adh_short Pfam Description: short chain dehydrogenase
  misc_feature: Functional Homolog Of Ceres SEEDLINE ID no. ME18396 at SEQ ID NO. 1012
MATTTRRLEGKVALITGAASGIGECAAKLFAEHGAKIVIADIQDQLGQAVCEAIGSSNSIYIHCDVTNEEDVRKAVDIAIATYGKLDIMFCNAGIIDPNKDHIIDNEKSDFERVLSVNVTGVFLSMKHAARVMVPTRAGSIISTASVVSNIGGLCPHAYTCSKHAVAGLTKNLAVELGQFGIRVNCLSPYAIDTPQATGFTGLKGEDFKNKVNSVANLKGVTLTTDDVAKAAVFLASDEAKYISGHNLFIDGGFSIVNPSFNMFQYPENPL

SEQ ID NO: 1115 - DNA, 1067 bp, Glycine max
  misc_feature: Ceres CLONE ID no.605144
  misc_feature: Encodes the peptide sequence at SEQ ID NO 1116
aatttcatatcgtaacaggttgttccttctatccctttcttttggtcttaggtcatatatcaatggcaacttcaacctctgcactcaataaaaggctggaaggaaaagttgcactgatcacaggaggagctagtggcatcggcaaacgcactgcagaagtgttcgctcagcaaggagccaaagtagtgatcgctgacatccaagacgaactgggacattccgttgctcagtccatagggccatcaacatgttgttatgtccattgcgatgtcaccgatgagaaccaaataaaaaatgccgtccaaaaagccgtagatgcttatgggaagctagacatcatgttcaacaacgccggcattgttgatcccaacaagaaccgaatcattgacaacgataaggcagatttcgaacgtgtcctaagcgtcaatgtcacgggtgttttccttgggatgaagcatgcggcgcaggcgatgatcccagcacgcagtggtagcatcatctctacggccagcataagctcctacgttggtggtgcagcctcgcatgcttactgttgtgctaagcatgctgtggttggtctaactaaaaatgcagcagttgagcttggacagttcggaataagggtgaattgtttgtcaccttacgctcttgctacacctttggccaccaagtttgttggagctaatgatgaggagcttgagactatcatgaactcactggctaatctcaagggtgtcactcttaaagctgaggatgtggctaatgccgcactttattttgctagtgatgattccaggtacgtcagtgggcaaaatttgctcatagatggaggcttcagcattgttaatccttcctttcacatgtttcagtacccggactcggagtcttgatttttgtctactatgaagaagcaagagtaattaataagggctcatatagattgagctatagtgcttgtgggattgggctttgattgtaaaacatacgggtgtttaaaaatgttgaactgaaccaaattgtgtgaaatcatcctatttaatttgtttcaattcaagtttactataacg

SEQ ID NO: 1116 - protein, 275 aa, Glycine max
  misc_feature: Ceres CLONE ID no.605144
  misc_feature: Bit score of 642.7 for HMM based on sequences of FIGURE 8.
  misc_feature (15)..(182): Pfam Name: adh_short Pfam Description: short chain dehydrogenase
  misc_feature: Functional Homolog Of Ceres SEEDLINE ID no. ME18396 at SEQ ID NO. 1012
MATSTSALNKRLEGKVALITGGASGIGKRTAEVFAQQGAKVVIADIQDELGHSVAQSIGPSTCCYVHCDVTDENQIKNAVQKAVDAYGKLDIMFNNAGIVDPNKNRIIDNDKADFERVLSVNVTGVFLGMKHAAQAMIPARSGSIISTASISSYVGGAASHAYCCAKHAVVGLTKNAAVELGQFGIRVNCLSPYALATPLATKFVGANDEELETIMNSLANLKGVTLKAEDVANAALYFASDDSRYVSGQNLLIDGGFSIVNPSFHMFQYPDSES

SEQ ID NO: 1117 - protein, 271 aa, Cucumis sativus
  misc_feature: Public GI ID no.15077030
  misc_feature: Bit score of 655.9 for HMM based on sequences of FIGURE 8.
  misc_feature (16)..(184): Pfam Name: adh_short Pfam Description: short chain dehydrogenase
  misc_feature: Functional Homolog Of Ceres SEEDLINE ID no. ME18396 at SEQ ID NO. 1012
MSIQLLPAIARRLEGKVAVITGGARGIGEQTAKLFFKHGAKVVIADIQDHLGQTLCKDLGQSSSVFVHCDVTKEKDVETAVDTAVSKYGKLDIMLNNAGVFEESPNFDFLKDDPLTFQRVVNVNLVGAFLGTKHAARVMKPAGRGSIVTTASICSVIGGIGTHAYTSSKHGVLGLMRNAAVDLGRYGIRVNCVSPNVVPTEMGRKLFKVKDGGEFPSFYWSLKNGDILREEDVGEAVVYLGSDESKCVSGLNLIVDGGFTVVNQALCSFRS

SEQ ID NO: 1118 - protein, 277 aa, Forsythia x intermedia
  misc_feature: Public GI ID no.13752458
  misc_feature: Bit score of 712.5 for HMM based on sequences of FIGURE 8.
  misc_feature (18)..(185): Pfam Name: adh_short Pfam Description: short chain dehydrogenase
  misc_feature: Functional Homolog Of Ceres SEEDLINE ID no. ME18396 at SEQ ID NO. 1012
MAATSQVLTAIARRLEGKVALITGGASGIGETTAKLFSQHGAKVAIADVQDELGHSVVEAIGTSNSTYIHCDVTNEDGVKNAVDNTVSTYGKLDIMFSNAGISDPNRPRIIDNEKADFERVFSVNVTGVFLCMKHAARVMIPARSGNIISTASLSSTMGGGSSHAYCGSKHAVLGLTRNLAVELGQFGIRVNCLSPFGLPTALGKKFSGIKNEEEFENVINFAGNLKGPKFNVEDVANAALYLASDEAKYVSGHNLFIDGGFSVCNSVIKVFQYPDS

SEQ ID NO: 1119 - protein, 271 aa, Cucumis sativus
  misc_feature: Public GI ID no.15077028
  misc_feature: Bit score of 645.4 for HMM based on sequences of FIGURE 8.
  misc_feature (16)..(184): Pfam Name: adh_short Pfam Description: short chain dehydrogenase
  misc_feature: Functional Homolog Of Ceres SEEDLINE ID no. ME18396 at SEQ ID NO. 1012
MSIQLLPAIARRLEGKVAVITGGARGIGEQTAKLFFKHGAKVVIADIQDHLGQTLCKDLGQSSSVFVHCDVTKEKDVETAVDTAVSKYGKLDIMLNNAGVFEESPNFDILKDDPLTFQRVVNVNLVGASLGTRHAARVMKPAGRGSIVTTASICSVIGGIGTHAYTSSKHGVLGLMRNAAVDLGRYGIRVNCVSPNVVPTEMGRKLFKVKDGGEFPSFYWSLKNGDILREEDVGEAVVYLGSDESKCVSGLNLIVDGGFTVVNQALCSFRS

SEQ ID NO: 1120 - DNA, 996 bp, Populus balsamifera subsp. trichocarpa
  misc_feature: Ceres ANNOT ID no.1454963
  misc_feature: Encodes the peptide sequence at SEQ ID NO 1121
atgaactcctctagttcactagcttcttttgcaaaaaggttagctggtaaagtggcaataatcactggaggtgctagcgggattggtgagagcacctctagactatttgttgaacatggagcgaatgtcattatagctgatgtccaggatcaagttggtcaatccctttgtaaggaacttggcacggagaacaatgtttactatgtacactgtgatgtcactagtgataccgatgtcaaaaatgttgtcgattttgccatatccaagtatgggaagctagacatcatgtacaacaacgctggcattactggcaatatagatccaacaatattaggcaccgagaatgaaaattttaaaagggtttttgaagttaatgtgtatggtggtttcttgggtgcaaagcatgctgctagagttatgattcctgtgaaaaaaggcgttattcttttcacatctagtgtggcttcaatggcttgtggtgagtcgcctcatgcttatacaatgtcgaagcatgcggtggtggggctaatgaagaatttgtgcgtggaactagggcaatatggaataagggttaactgcatttctccgtgtgctcttgctactccactgctaagaaatgcaatgggagcggataaaagttttgtggagcatgtagtttgtgaatctgccaatctgaaaggagtggtgccgtcacccaaagatgtggcggaggctgccttgtatttaggtagcgatgagtccaagtatgtgagtggactaaatctcatggttgatgggggatacagcaccactaaccagtccttcaatatgttagggcaatatacaatagtaatgttagaggttaccacacaagagtatgattacaatatttcccatataggtatattctataatatgccccttcaagttgagggtgggggatcaacccgaagcttgaaaataaaagcagtaaatgaagcagtaggaagtggcttagtgaagacatctgcaagttga

SEQ ID NO: 1121 - protein, 331 aa, Populus balsamifera subsp. trichocarpa
  misc_feature: Ceres ANNOT ID no.1454963
  misc_feature: Bit score of 536.4 for HMM based on sequences of FIGURE 8.
  misc_feature (17)..(185): Pfam Name: adh_short Pfam Description: short chain dehydrogenase
  misc_feature: Functional Homolog Of Ceres SEEDLINE ID no. ME18396 at SEQ ID NO. 1012
MNSSSSLASFAKRLAGKVAIITGGASGIGESTSRLFVEHGANVIIADVQDQVGQSLCKELGTENNVYYVHCDVTSDTDVKNVVDFAISKYGKLDIMYNNAGITGNIDPTILGTENENFKRVFEVNVYGGFLGAKHAARVMIPVKKGVILFTSSVASMACGESPHAYTMSKHAVVGLMKNLCVELGQYGIRVNCISPCALATPLLRNAMGADKSFVEHVVCESANLKGVVPSPKDVAEAALYLGSDESKYVSGLNLMVDGGYSTTNQSFNMLGQYTIVMLEVTTQEYDYNISHIGIFYNMPLQVEGGGSTRSLKIKAVNEAVGSGLVKTSAS

SEQ ID NO: 1122 - DNA, 831 bp, Sorghum bicolor
  misc_feature: Ceres ANNOT ID no.6030208
  misc_feature: Encodes the peptide sequence at SEQ ID NO 1123
atggcagccagcagctccgatcaagttcctccagccgcaatgaagctggagggcaaggtggcgctgatcaccggcggcgcgagcggcatcggggagtgcacggcgcggctcttcgtgaagcacggcgcgcgcgtcgtggtggcggacatccaggacgaagccggcgccgctctctgcgccgagctgggcgccgacgccgtcgccagctacgtgcactgcgacgtcaccgtcgaggccgacgtcgcggcggccgtggaccacgccgtggcccggttcggcgcgctggacatcatgttcaacaacgcgggcatcggcggcgcggcttgccacagcatccgggagagcaccaaggaggacttcgagcgcgtgctctccgtcaacctcgtgggaccgttcctgggcaccaagcacgcggcgcgggtcatggtccccgcgggccgcggcggctgcatcatcggcacgtccagcctcgcctccgcggtggccggcgccgcgtcgcacgcctacacgtgcgccaagcgcggcctcgtggcgctcacggagaacgccgccgcggagctgggtcgccacgggatccgggtcaactgcgtctcgcccgccgcggctgccacgccgctcgccacggcgtacgtgggactggagggggaggcgttcgagcaggccatggaggccgtcgctaacctcaagggcgttcgcctgcgggtggcggacatcgccgccgccgtgctctacctcgccagcgacgacgcgcggtacatcagcgggcacaacctgctcctcgacgggggcttctccatcgtcaacccgtcctttgggatcttcaaagattga

SEQ ID NO: 1123 - protein, 276 aa, Sorghum bicolor
  misc_feature: Ceres ANNOT ID no.6030208
  misc_feature: Bit score of 544.7 for HMM based on sequences of FIGURE 8.
  misc_feature (19)..(188): Pfam Name: adh_short Pfam Description: short chain dehydrogenase
  misc_feature: Functional Homolog Of Ceres SEEDLINE ID no. ME18396 at SEQ ID NO. 1012
MAASSSDQVPPAAMKLEGKVALITGGASGIGECTARLFVKHGARVVVADIQDEAGAALCAELGADAVASYVHCDVTVEADVAAAVDHAVARFGALDIMFNNAGIGGAACHSIRESTKEDFERVLSVNLVGPFLGTKHAARVMVPAGRGGCIIGTSSLASAVAGAASHAYTCAKRGLVALTENAAAELGRHGIRVNCVSPAAAATPLATAYVGLEGEAFEQAMEAVANLKGVRLRVADIAAAVLYLASDDARYISGHNLLLDGGFSIVNPSFGIFKD

SEQ ID NO: 1124 - DNA, 831 bp, Sorghum bicolor
  misc_feature: Ceres ANNOT ID no.6076767
  misc_feature: Encodes the peptide sequence at SEQ ID NO 1125
atggcaagcagtaccgtcgccctccccaccactccaccaagaaagttgcagggaaaggtggccatgatcactggcggggcgagcgggatcggcgagcgcacggtgcggctgttcgtggagcacggcgcccgcgtcgtggtggccgacatccaggacgaggccggcgcgcgcgtctgcgccgacgttggcgcgggcgccgccagctacttccactgcgacgtgaccagcgaggacgacgtcgctgccgcggtggaccacgccgtggcgacgttcggagcgctggatatcatgttcaacaatgctggcgtcagcgggccggcgtgctacagcgtccgggacagcggcaaggctgacttcgagcgcgtgctggccgtgaacctggtgggcccgttcctcggcaccaagcacgcggcgcgggtgatggtacccgcgcgccgcggcggctgcatcatagggacgtccagcgtggcggcggccgtgaccggcgcgtcctcgtacgcgtacgcgtgcgcgaagcgcgcgctcgtggcgctgacggagaacgccgcggcggagctcggccggcacggcatccgcgtgaactgcgtctcccccgcgggggtcgccacgccgctgaccatgaggtacatgggcctcgaagcggaggcgttcgagcaggcaatggaggccatatcaaacctcaagggcgtgggcgccctgcgagcggacgacgtcgccgccgccgtgctcttcctcgccagcgatgacgcgcggtacatcagcggccacaacctgttcgtcgacggtggcatctctatcgcgaacccgtcctttggaacgtccaaagactga

SEQ ID NO: 1125 - protein, 276 aa, Sorghum bicolor
  misc_feature: Ceres ANNOT ID no.6076767
  misc_feature: Bit score of 502.4 for HMM based on sequences of FIGURE 8.
  misc_feature (19)..(187): Pfam Name: adh_short Pfam Description: short chain dehydrogenase
  misc_feature: Functional Homolog Of Ceres SEEDLINE ID no. ME18396 at SEQ ID NO. 1012
MASSTVALPTTPPRKLQGKVAMITGGASGIGERTVRLFVEHGARVVVADIQDEAGARVCADVGAGAASYFHCDVTSEDDVAAAVDHAVATFGALDIMFNNAGVSGPACYSVRDSGKADFERVLAVNLVGPFLGTKHAARVMVPARRGGCIIGTSSVAAAVTGASSYAYACAKRALVALTENAAAELGRHGIRVNCVSPAGVATPLTMRYMGLEAEAFEQAMEAISNLKGVGALRADDVAAAVLFLASDDARYISGHNLFVDGGISIANPSFGTSKD

SEQ ID NO: 1126 - DNA, 2027 bp, Arabidopsis thaliana
  misc_feature: Ceres SEEDLINE ID no.ME20095
  misc_feature: Genomic Sequence
  misc_feature: Expected Sequence
  misc_feature: Encodes the peptide sequence at SEQ ID NO. 1129
atggacatgaaatctggtcactcgtctcctgtaatgactgattctccaccaataagcaactcaagattaaccattcgtcagaatagacttccttactcatcagcagcagccacggctatctcacagaacaacaatctcttactaaccgttccaagaaagaaaactgggatccttgatgatgttaagtctaatggttggcttgatgcgatgaaatcttcttctcctcctcctacaatacttaacaaagataacttaagcaatgatgctacggatatgacttatcgcgaatggatggtcagtcccttactgtcctttttttcatctgaaaatatgtgccgttgttttgatgttgatagtcttctttttgttttgttttataatcctgttttagcagctcaagtatccatcagctcttacctcttttgagaaaatcatgagttttgcaaaaggcaaaagaatagcattgtttcttgattatgacgggacactttcgcctattgttgaggaacctgattgtgcatacatgtcaagtgctgtaagtttttaactttcctctattaaattcaattgctaaaacagatcaaatttgtgattcatcctcataatgaattatatggttcacgcctttttacatgtttagatgcgtagtgcagtgcaaaatgttgccaagtatttccctaccgcgatcattagtggaagaagccgggataaggtaatctttctacatgttttattttcttcatcaagaacattttcttgtgtgatctaatgtaataatagtacattttgcttcatctaggtgtatgagtttgttaatttgagtgaactttattacgccggaagccatggaatggacatcatgagtcccgcaggagaatctttaaaccatgaacatagccgtactgtatcagtttacgaacaggttcattttcttgctttttgtttgttttctacaatatctgtttgctacatcagattcttaaaatgtgatgtttgcaaatttcaggggaaagatgtaaatctattccagcctgctagcgagtttctcccgatgatcgataaggtattttgaaacacatcttctgctatatataacaacatcatgtatgattgttgaactcttgatatgatcttctcaggtgctttgttctcttatagagagtacaaaagatatcaaaggggtaaaagtagaagacaacaagttctgcatctctgtgcattaccgcaatgtagaagaaaaggtttggtttctcaattcagtaacatttttggttcctttataaaccaatacactttcttgaaaaagctcttctttgttacagaactggacattggttgcacagtgtgtagatgatgtcatcagaacatatccaaaactacggctaacacatggccggaaggtaaaaacgtctgaaatctttcttacgtatttcaacaaaaagaagttcaaagttttgattttgttctcttggtttgtatgttttgcttaaaaggttttagagatccgtcctgtgattgactgggacaaagggaaagctgtgacatttctacttgaatcactcggtagttaacaaaatccttctcatctatctgcttctgttctgaatcttggtttggtttggccattgactttaatacatttctcaggcctaaacaactgtgaggatgttcttccaatctatgttggggatgatcgaacagacgaagatgcatttaaggtttgttcttataaacacattgagctaaaacatttcattaagaaatagttttgacttaaagtgcaagtaatgtcaggtactacgagatggaccaaaccacggttatggtatattagtctctgctgtgcctaaagacagcaatgccttttactcgcttcgtgacccgtctgaggtaaattaagaaatcattcaactgaaaatacttgagctacgattttagatcatacgagtttgatatttttgttatgtatatatcaggtgatggagtttctgaagtcattggtgacatggaagagatcaatgggttaa

SEQ ID NO: 1127 - DNA, 2027 bp, Arabidopsis thaliana
  misc_feature: Ceres SEEDLINE ID no.ME20095
  misc_feature: Inplanta Sequence
  misc_feature: Encodes the peptide sequence at SEQ ID NO. 1129
atggacatgaaatctggtcactcgtctcctgtaatgactgattctccaccaataagcaactcaagattaaccattcgtcagaatagacttccttactcatcagcagcagccacggctatctcacagaacaacaatctcttactaaccgttccaagaaagaaaactgggatccttgatgatgttaagtctaatggttggcttgatgcgatgaaatcttcttctcctcctcctacaatacttaacaaagataacttaagcaatgatgctacggatatgacttatcgcgaatggatggtcagtcccttactgtcctttttttcatctgaaaatatgtgccgttgttttgatgttgatagtcttctttttgttttgttttataatcctgttttagcagctcaagtatccatcagctcttacctcttttgagaaaatcatgagttttgcaaaaggcaaaagaatagcattgtttcttgattatgacgggacactttcgcctattgttgaggaacctgattgtgcatacatgtcaagtgctgtaagtttttaactttcctctattaaattcaattgctaaaacagatcaaatttgtgattcatcctcataatgaattatatggttcacgcctttttacatgtttagatgcgtagtgcagtgcaaaatgttgccaagtatttccctaccgcgatcattagtggaagaagccgggataaggtaatctttctacatgttttattttcttcatcaagaacattttcttgtgtgatctaatgtaataatagtacattttgcttcatctaggtgtatgagtttgttaatttgagtgaactttattacgccggaagccatggaatggacatcatgagtcccgcaggagaatctttaaaccatgaacatagccgtactgtatcagtttacgaacaggttcattttcttgctttttgtttgttttctacaatatctgtttgctacatcagattcttaaaatgtgatgtttgcaaatttcaggggaaagatgtaaatctattccagcctgctagcgagtttctcccgatgatcgataaggtattttgaaacacatcttctgctatatataacaacatcatgtatgattgttgaactcttgatatgatcttctcaggtgctttgttctcttatagagagtacaaaagatatcaaaggggtaaaagtagaagacaacaagttctgcatctctgtgcattaccgcaatgtagaagaaaaggtttggtttctcaattcagtaacatttttggttcctttataaaccaatacactttcttgaaaaagctcttctttgttacagaactggacattggttgcacagtgtgtagatgatgtcatcagaacatatccaaaactacggctaacacatggccggaaggtaaaaacgtctgaaatctttcttacgtatttcaacaaaaagaagttcaaagttttgattttgttctcttggtttgtatgttttgcttaaaaggttttagagatccgtcctgtgattgactgggacaaagggaaagctgtgacatttctacttgaatcactcggtagttaacaaaatccttctcatctatctgcttctgttctgaatcttggtttggtttggccattgactttaatacatttctcaggcctaaacaactgtgaggatgttcttccaatctatgttggggatgatcgaacagacgaagatgcatttaaggtttgttcttataaacacattgagctaaaacatttcattaagaaatagttttgacttaaagtgcaagtaatgtcaggtactacgagatggaccaaaccacggttatggtatattagtctctgctgtgcctaaagacagcaatgccttttactcgcttcgtgacccgtctgaggtaaattaagaaatcatgcaactgaaaatacttgagctacgattttagatcatacgagtttgatatttttgttatgtatatatcaggtgatggagtttctgaagtcattggtgacatggaagagatcaatgggttaa

SEQ ID NO: 1128 - DNA, 1158 bp, Arabidopsis thaliana
  misc_feature: Ceres SEEDLINE ID no.ME20095
  misc_feature: Inplanta Sequence shown without introns
  misc_feature: Encodes the peptide sequence at SEQ ID NO. 1129
atggacatgaaatctggtcactcgtctcctgtaatgactgattctccaccaataagcaactcaagattaaccattcgtcagaatagacttccttactcatcagcagcagccacggctatctcacagaacaacaatctcttactaaccgttccaagaaagaaaactgggatccttgatgatgttaagtctaatggttggcttgatgcgatgaaatcttcttctcctcctcctacaatacttaacaaagataacttaagcaatgatgctacggatatgacttatcgcgaatggatgcagctcaagtatccatcagctcttacctcttttgagaaaatcatgagttttgcaaaaggcaaaagaatagcattgtttcttgattatgacgggacactttcgcctattgttgaggaacctgattgtgcatacatgtcaagtgctatgcgtagtgcagtgcaaaatgttgccaagtatttccctaccgcgatcattagtggaagaagccgggataaggtgtatgagtttgttaatttgagtgaactttattacgccggaagccatggaatggacatcatgagtcccgcaggagaatctttaaaccatgaacatagccgtactgtatcagtttacgaacaggggaaagatgtaaatctattccagcctgctagcgagtttctcccgatgatcgataaggtgctttgttctcttatagagagtacaaaagatatcaaaggggtaaaagtagaagacaacaagttctgcatctctgtgcattaccgcaatgtagaagaaaagaactggacattggttgcacagtgtgtagatgatgtcatcagaacatatccaaaactacggctaacacatggccggaaggttttagagatccgtcctgtgattgactgggacaaagggaaagctgtgacatttctacttgaatcactcggcctaaacaactgtgaggatgttcttccaatctatgttggggatgatcgaacagacgaagatgcatttaaggtactacgagatggaccaaaccacggttatggtatattagtctctgctgtgcctaaagacagcaatgccttttactcgcttcgtgacccgtctgaggtgatggagtttctgaagtcattggtgacatggaagagatcaatgggttaa

SEQ ID NO: 1129 - protein, 385 aa, Arabidopsis thaliana
  misc_feature: Ceres SEEDLINE ID no.ME20095
  misc_feature: Bit score of 944.7 for HMM based on sequences of FIGURE 9.
  misc_feature (124)..(368): Pfam Name: Trehalose_PPase Pfam Description: Trehalose-phosphatase
MDMKSGHSSPVMTDSPPISNSRLTIRQNRLPYSSAAATAISQNNNLLLTVPRKKTGILDDVKSNGWLDAMKSSSPPPTILNKDNLSNDATDMTYREWMQLKYPSALTSFEKIMSFAKGKRIALFLDYDGTLSPIVEEPDCAYMSSAMRSAVQNVAKYFPTAIISGRSRDKVYEFVNLSELYYAGSHGMDIMSPAGESLNHEHSRTVSVYEQGKDVNLFQPASEFLPMIDKVLCSLIESTKDIKGVKVEDNKFCISVHYRNVEEKNWTLVAQCVDDVIRTYPKLRLTHGRKVLEIRPVIDWDKGKAVTFLLESLGLNNCEDVLPIYVGDDRTDEDAFKVLRDGPNHGYGILVSAVPKDSNAFYSLRDPSEVMEFLKSLVTWKRSMG

SEQ ID NO: 1130 - protein, 385 aa, Vitis vinifera
  misc_feature: Public GI ID no.147771549
  misc_feature: Bit score of 958.4 for HMM based on sequences of FIGURE 9.
  misc_feature (123)..(367): Pfam Name: Trehalose_PPase Pfam Description: Trehalose-phosphatase
  misc_feature: Functional Homolog Of Ceres SEEDLINE ID no. ME20095 at SEQ ID NO. 1129
MDLKSNHSSPVLTDPPPVNKSRFGIRSNLLPYSPPGAAFSSTLFLTIPRKKNGVLDDVRSSSWLDAMKSSSPTHKKITKDFNTVLASTDTDVTYRTWLLKYPSALKSFEQITNYAKGKRIALFLDYDGTLSPIVDNPDRAFMSDCMRATVRNVAKFFPTAIISGRSRDKVYNFVGLTELYYAGSHGMDIMGPVRHSISNDHPNCIRLTDKQGKEVNLFQPASEFLPMIDEVFRSLVRCTKEIKGAEVENNKFCVSVHYRNVDEKYWKTIAQCVDDILKDYPRLRLTHGRKVLEVRPVIDWDKGKAVEFLLESLGLNNSDDVLPIYVGDDRTDEDAFKFLRDGKRGYGILVSSVPKESNAFYSLRDPLEVMEFLKLLVMWKKSSAL

SEQ ID NO: 1131 - protein, 391 aa, Medicago truncatula
  misc_feature: Public GI ID no.144924741
  misc_feature: Bit score of 822.6 for HMM based on sequences of FIGURE 9.
  misc_feature (124)..(368): Pfam Name: Trehalose_PPase Pfam Description: Trehalose-phosphatase
  misc_feature: Functional Homolog Of Ceres SEEDLINE ID no. ME20095 at SEQ ID NO. 1129
MDLQPSHASPILTDPVSKSRLGIHSSLLAYSQQDSPLSPGKYTKSNSKKNMGSLDDVRSNGWLDAMKASSPPRKKSVLKGSSALVASIDFDMEDYNLWMLEYPSALGAFEKIIDHAKNKKIAMFLDYDGTLSPIVEDPDCAFMTEPMRTTVRRVAKCFPTAIISGRSRDKVFDLVKLTELYYAGSHGMDIIGPVSDTLHENHPDCVKSTDDQGNEITLFQPAKEFLPMIDEVFRTLIDITKDIEGAKVENHKFCVSVHYRNVEENNWTVIAQRVHDILKNYPRLRSTHGRKVLEIRPVIDWNKGKAVEFLLESLGLTDMNDVLPIYIGDDKTDEDAFKVLRESNRGCGILVSSVRKDSNALYSLRDTSEVMRFLQRLVNWKRKQERKHGKK

SEQ ID NO: 1132 - protein, 525 aa, Acidovorax sp. JS42
  misc_feature: Public GI ID no.121594508
  misc_feature: Bit score of 234.7 for HMM based on sequences of FIGURE 9.
  misc_feature (284)..(508): Pfam Name: Trehalose_PPase Pfam Description: Trehalose-phosphatase
  misc_feature: Functional Homolog Of Ceres SEEDLINE ID no. ME20095 at SEQ ID NO. 1129
MAIDDVDGNAPAPSANFDCGSFAAGIFDLDGVVTRTARVHAASWKRLFDDYLRQRAECTGEAFEPFNDADYRRYVDGKPRYEGVGSFLRSRGIELDYGTPADPPERETVCGLGNRKNILFQEQLAQTGVEVYDTSVAFLRRLRERGLKTALVSSSKNAAAVLEAAGLTGLFDACVDGIEAARLGLKGKPNPDIFLRACELLEVSAADAFAVEDALSGVEAAHAAGFGRVIGIDRTGERAALLAHGADLVVGDLAELEPVAALPDALESYEEIRQRLRAKRAAVFLDYDGTLTPIVARPELAVLSEEMRATVRELAQVCAVAVVSGRDRADVERLVGLDTLVYAGSHGFDIAGPGGLHMQHERAAEFLPALDRAESRLRKATKSVPGALVERKRYAIAVHYRLVAPDDLPVLEAAVDAALAETTDKLRKTGGKKVFELRPKLTWDKGRAVCWLLEALDLDGPEIVPLYLGDDETDEDAFEALGELHGIGLLVARAPQATAAQYGLEDPAAVARFLRTLITTLKAST

SEQ ID NO: 1133 - protein, 418 aa, Candidatus Kuenenia stuttgartiensis
  misc_feature: Public GI ID no.91202290
  misc_feature: Bit score of 249.7 for HMM based on sequences of FIGURE 9.
  misc_feature (179)..(401): Pfam Name: Trehalose_PPase Pfam Description: Trehalose-phosphatase
  misc_feature: Functional Homolog Of Ceres SEEDLINE ID no. ME20095 at SEQ ID NO. 1129
MGKLKNEYFLKHIGDHGAEVYDSTIDFIHSLKKQGCKTAIISSSRNCAMILDSTNLSSLFDVRVDGLDSEVLGIKGKPAPDIFLEAARQLKAKPERAVVIEDAISGVQAGKAGKFRLVVGVARTGDKESLLENGADVVVEDLSEIGVRNDIEVIHGLPSALDSIDDIANQARGKRIAVFLDYDGTLTPIVETPDKAIMAEDMREAVIKLSNNCTVGIISGRDLKDVQEKVEIDSFVYAGSHVFDIAGPEGLNIKSQAGAEFLPVLDKAEKELSEKLRSIEGVFVERKKFAIAIHYRLVTPEKAELVDEIVDKVASVYPELRKAYGKKIFELQPDIDWHKGKALLTLLKALKLDGDDVLPFYIGDDVTDEDAFWTLKGSGIGIVVWDEPYETAASYSLKNPEEVRKFLLKLIPLGGGHE

SEQ ID NO: 1134 - protein, 346 aa, Rhodoferax ferrireducens DSM 15236
  misc_feature: Public GI ID no.89900939
  misc_feature: Bit score of 222.5 for HMM based on sequences of FIGURE 9.
  misc_feature (104)..(328): Pfam Name: Trehalose_PPase Pfam Description: Trehalose-phosphatase
  misc_feature: Functional Homolog Of Ceres SEEDLINE ID no. ME20095 at SEQ ID NO. 1129
MNAKNPSSEQLDVKPARSVVVEEALAGVQAGRRAGFGMVVGVDRSGHAQELKDAGAHMVVTDLVEVSVAQEVAPARRRSDELPSALAALADIKARMKGRSPAVFLDYDGTLTPIVQSPELALLSDDMRDAVRTLARRCTVVVMSGRDLPDVQARVGLKDIVYGGSHGFEIFGPQGMHFEQEQGGEFLPQLDRAELALRERLGHVPGLLVERKKYAIAVHFRLVGESDLEAVEPAVNAVLAAHPKLRKTHGKMIFEVQPDIDWDKGRAMIWLLGKLGLAQSDVFVLYLGDDITDEDAFRSLNAQGNGIGILVRDEPRDTAAQYALGSIEEVRRFLTELATLTEGTRA

SEQ ID NO: 1135 - protein, 271 aa, Pelobacter carbinolicus DSM 2380
  misc_feature: Public GI ID no.77917672
  misc_feature: Bit score of 142.8 for HMM based on sequences of FIGURE 9.
  misc_feature (35)..(256): Pfam Name: Trehalose_PPase Pfam Description: Trehalose-phosphatase
  misc_feature: Functional Homolog Of Ceres SEEDLINE ID no. ME20095 at SEQ ID NO. 1129
MEFSPHKTMSHTLPSALECLATIQHMLQNKRGMVFLDYDGTLTPIVERPEWAQLSQKMRDAVNQLSQRCDVAIVSGRDLQDIRNLVGIEGILYAGSHGFDISGPGGHLELEQGIDYLPALDRAETALTKQLAEVAGTQIERKRFAIAVHFRRADPADVSQIETIVDTILEKNPGLRKTGGKMIFELRPDIDWDKGKALRWILARLGMHDDEVLPIYIGDDLTDEDAFCELQKRGIAILVSDEQRLTAANYVLNDPLEVEQFLKRLKVNQNS

SEQ ID NO: 1136 - protein, 1314 aa, Nitrosococcus oceani ATCC 19707
  misc_feature: Public GI ID no.77165252
  misc_feature: Bit score of 224.7 for HMM based on sequences of FIGURE 9.
  misc_feature (275)..(497): Pfam Name: Trehalose_PPase Pfam Description: Trehalose-phosphatase
  misc_feature: Functional Homolog Of Ceres SEEDLINE ID no. ME20095 at SEQ ID NO. 1129
MNSHKTISRSHFDAVIFDLDGVVTQTARVHATAWKTMFDDFLQKRAQGSEFRPFSDHDYRDYVDGKPRYEGVKSFLRSRHIKLPYGNPNDSLEKETVCGLGNRKNEIFQIKLKKEGAEAYQSSVQLIRRLRSKGFRTAVVSASKNCGPILESVELTHLFEVKVDGNDAEALDLQGKPHPATFLEAARRLGVEPKRCMVFEDAIAGVKAGRQGKFGRVIGVNRKNQVEALQEAGADTVIEDLAEMTLVARLCDLSPALEALESIQNRIAQREIVVFLDYDGTLSPIVSRPEEAHLSAEMNRTLRKLADQCPVAIISGRGLADVRQRVAIESLYYAGSHGFEIAGPEGLAMEQEQAKAYLPLLDETEQALAQQLENIVGAQIERKRFSIAIHYRNVAEDQIEAVEKAVDRVLGSHDRLHKKYGKKVYELQPAVAWDKGQALLWLLGKLKLNYPDVLPLYIGDDLTDEDAFQTLEEWGLGLVVGTETRHTYAEYRLKDPAQVREFLTALTRILQERSAWTLAYHRFEPKEEGLREALCTLGNGYFATRGAAPESRADATHYPGTYMAGGYNRLKTAIAGRTVENEDLVNWPNWLCVNFRPLGGKWLNLATMEILFYHQKLDIKQGLLRRVVHFRDPEGRETRVVQRRLVSMAHMHQAALETVITPLNWSGTLEVHSALDGQIRNSGVARYQALNSKHLEPVETRPVDERSFLLKVRTNQSHLIFAQAARLEVFQKNKRALVERQTEEETAYIAQAFITEITKETPLTVEKTVALYTARDSAISECGLEAIKAIQESPRFESLLEAHRLAWEHLWRQFDMRLEIIDDSGDHPIQRVLRLYSFHLLQSASMHSLDIDVGMPSRGWHGEAYRGHIFWDELIIFPFLNYRVPQITQALLMYRYRRLHEARRAAQALGYKGALYPWQSGSNGREESQQLHLNPRSGRWLPDHSYLQRHINAAIVYNIWQYFQVTGDLDFLACYGAEMILEIARFWASIATYNETLDRYEILGVMGPDEFHDAYPEMGSPGLNNNAYTNLMAVFVFNKALELFQLLPAQACQQLCEKLTIEESEKARWRDLSGKMRIVFHDDGIISQFEGYGELAEFDWESYREKYGNIQRLDRLLEAEGDTVNRYKASKQADVLMLFYLFSAPELGELFEQLGYIFKPEDIPKNIDYYLQRTSNGSSLSWIIHAWAATRRDRKHSWQLFQEALKTDVADIQGGTTPEGIHLGAMAGCIDLVQRCYTGLEARGQVLRFNPCFPEELRQLHMHLHYRGHWLELDISREKLKIESLTCGAAPVEIEVKGDRFSFKEGKVKEIELN

SEQ ID NO: 1137 - protein, 531 aa, Stigmatella aurantiaca DW4/3-1
  misc_feature: Public GI ID no.115375374
  misc_feature: Bit score of 201.9 for HMM based on sequences of FIGURE 9.
  misc_feature (290)..(513): Pfam Name: Trehalose_PPase Pfam Description: Trehalose-phosphatase
  misc_feature: Functional Homolog Of Ceres SEEDLINE ID no. ME20095 at SEQ ID NO. 1129
MQGSSLMASPSSTVVLSRHELDAVLFDLDGVVTRTARVHAAAWKRLFDAYLEGRARRTEGRFQPFTDEDYRRFVDGRPRLEGIRCFLESRGLSLPEGTPGDGPEAETVHGLGERKNAYFHEALAREGVEVYPPAVRLLEQIRAAGFRTAVVTSSRNGEAVLRAAGLEHLFDARVDGVEAGRLELPGKPAPDTFLEGARRLGVAPGRAAVLEDARSGVQAGRRGGFGCVIGVRRSGAEGALVKAGADVEVTELSSVGVEADLETRPMREVPLAMERREEWLRRMTGRVAVFLDYDGTLTPIVPVPEEAFLADSMRTTLEELARYVPVAIVSGRDLPMLKGFVKLQGLYFAGSHGFDIEGPGGRHFQQEEGKALLPELDAAERELTEALAGIPGAGVERKRFSVAVHWRHVEAARLPEVEQAVAGCQARHPKLTRSGGKKVFELRPGIDWHKGRAVEWLLKALGLEGEGVLPVFIGDDLTDEDAFRTLKGRGLGLVVRGDEERPTAADYALRDVEEVRRFLGVLIAHVGGAKR

SEQ ID NO: 1138 - protein, 276 aa, Geobacter sp. FRC-32
  misc_feature: Public GI ID no.110602449
  misc_feature: Bit score of 107.1 for HMM based on sequences of FIGURE 9.
  misc_feature (39)..(261): Pfam Name: Trehalose_PPase Pfam Description: Trehalose-phosphatase
  misc_feature: Functional Homolog Of Ceres SEEDLINE ID no. ME20095 at SEQ ID NO. 1129
MAGRGSGFVDQTSHQSLPSALANLQEILQLGRGRQLVIFLDYDGTIAPITPTPDSALITPEMHRAMLRLAAKCTVGVISGRDLPDVRQRVNIDSIVYAGSHGFEIGGPKGLHVEQPIGIQCLPTLDLTHQEISRQLAEVKGAIVERKRFVITVHYRLVAEQEVTLVEAAVDQAIHRHPQLRKTAGKKMFELLPNTDWNKGKAILSLLDILEMNGPEVLPIYLGDDTTDEDAFRALQGTGLGIFVGEEAVESAAGYGLRDWEEVREFLLELTPFCRV

SEQ ID NO: 1139 - DNA, 1760 bp, Zea mays
  misc_feature: Ceres CLONE ID no.1562633
  misc_feature: Encodes the peptide sequence at SEQ ID NO 1140
agtcctccgttctcctcttcctctctctctcttctctctctctctacggattgcctcacacgcatctcgcgtgcaattcaagcgaaactttctgaatatcaaagtggcatagagctccacttttatggccatccctatgaaggcctctccgggttcctgatatagatgtttccttgttctgaacatgaaaagttctcaggtactccgccgttgatgaactgcctccacacctgcggcgacaagaagacgctgaagaagtggtttttcatcgacaagacagtaggctaaatccagtcccagagaacaaattgaagcaccactccccaccgcacagcagcacagctcttctcttcaccgatcccgatggatatgggcagcggctcgtcacctgtcatcaccgatccgatatcgataagcccaccgctgctgggaggcttgacgtcgaacctgatgccgttctcggtcatgtccggaggctgctcctccagtcctagcatgagcgccagcagcaggcgtaaaatcgaggaggtccttgtcaatggcctgctagacgcgatgaaatcgtcgtcgcctcgcaagaagcacaacctcgccttcggacaggataattcgcccgacgaagatcctgcttacactgcatggctgtcaaaatgcccttctgcgctggcctccttcaagcagatagtagccaacgcacagggcaggaggatcgctgtgttcttggattacgacggcaccctgtcgccgatcgtcgacgatcccgacaaagcgttcatgtcccctgtgatgagagctgctgttagaaatgtcgcgaagtacttccctaccgcgattgtcagcggaaggtcccgtaagaaggtgtttgaatttgtaaaactgacggaactgtactacgctggtagtcacgggatggacatagtgacatctgcagcagcacatgctactgaaaagtgcaaagaagccaatctcttccaacctgcttgcgagtttctccctatgattaatgaggtttccaagtgcctcgtggaggtcacgagttcaattgaaggtgcaagagttgagaacaacaagttctgtgtatctgtacattaccgcaacgtagcagagaaggactggaaagtggtcgcaggactcgtgaaacaagtcttggaggccttccctcgtctcaaagtaaccaacgggcgaatggttttagaggttcgcccggtgatcgactgggacaagggaaaggctgtcgagttcctgcttcggtcgctcggcctaagcgactccgaagatgtggttcctatctacatcggagacgatcgaacagacgaagacgccttcaaggtactgcgagagcgaagctgtggatacggaatcctagtctcgcaggtgcccaaggacactgaagccttctactcgctgagagacccgtctgaagtgatggggttcctcaattccttggtgagatggaagaagcacccgctgtgacgcaactgaaaacacaacgactgattcagaagccgtaaagcgactgtacttcgtgcggcggcaattttgtagagtttttggctcaccgggtggctcattctttcatgcgtttttattttttatttttttaactgtcacagtccttcgtcactgagaaataacaagtggttgtcccacaccctcttgcaactgtaatctgtaagcaagaggccctccctgttcggtctatatatatatattgaataaaaccgggacgcttttgccttgccctaaaaaaaaaaaaaaaa

SEQ ID NO: 1140 - protein, 369 aa, Zea mays
  misc_feature: Ceres CLONE ID no.1562633
  misc_feature: Bit score of 890.9 for HMM based on sequences of FIGURE 9.
  misc_feature (119)..(352): Pfam Name: Trehalose_PPase Pfam Description: Trehalose-phosphatase
  misc_feature: Functional Homolog Of Ceres SEEDLINE ID no. ME20095 at SEQ ID NO. 1129
MDMGSGSSPVITDPISISPPLLGGLTSNLMPFSVMSGGCSSSPSMSASSRRKIEEVLVNGLLDAMKSSSPRKKHNLAFGQDNSPDEDPAYTAWLSKCPSALASFKQIVANAQGRRIAVFLDYDGTLSPIVDDPDKAFMSPVMRAAVRNVAKYFPTAIVSGRSRKKVFEFVKLTELYYAGSHGMDIVTSAAAHATEKCKEANLFQPACEFLPMINEVSKCLVEVTSSIEGARVENNKFCVSVHYRNVAEKDWKVVAGLVKQVLEAFPRLKVTNGRMVLEVRPVIDWDKGKAVEFLLRSLGLSDSEDVVPIYIGDDRTDEDAFKVLRERSCGYGILVSQVPKDTEAFYSLRDPSEVMGFLNSLVRWKKHPL

SEQ ID NO: 1141 - DNA, 1116 bp, Oryza sativa
  misc_feature: Ceres ANNOT ID no.1692728
  misc_feature: Encodes the peptide sequence at SEQ ID NO 1142
atggatttgagcaatagctcacctgtcatcaccgatccggtggcgatcagccagcagttgttgggcggcctgccttcaaatctgatgcagttttcagtcatgcccggtggctactccagctctggcatgaacgttggtgtcagtaggctcaaaatcgaggaagtccttgtcaatggactgcttgatgccatgaaatcctcgtcacctcgcaggaggctgaatgtagcatttggcgaggacaattcatctgaagaagaagaccctgcttacagcgcttggatggcaaaatgtccttctgctttggcttccttcaagcaaattgtagccagtgcacaagggaagaagattgctgtgtttctagactatgacggcacactgtcgcctattgtggatgatcctgacaaagcagtgatgtctcccgtgatgagagctgctgtgagaaatgttgcgaagtacttccccactgcaattgtcagcggaaggtcccgcaataaggtgtttgaatttgtaaaactgaaggagctttattatgctggaagccatggtatggacataatggcaccttcagcaaatcatgagcacagtgctgaaaagagcaaacaggccaatctcttccaacctgcacacgactttctgccaatgatcgatgaggttaccaagtccctcttgcaagttgtcagtggaattgaaggtgcaactgttgagaacaacaaattctgcgtttctgtacattatcgcaacgttgcagagaaggattggaaactggtcgcacggctcgtaaacgaagtgctggaggcttttcctcgtctcaaagtaaccaatggacgaatggttttagaggttcgtccggtgatcgactgggacaagggaaaggctgtggagtttctgctccagtcactcgggctaaatgactctgaaaatgtgatccccatctacattggagacgacagaactgacgaagacgctttcaaggtacttcgacagcgaaattgcggttatggaatactagtttcacaggttcccaaggaaactgaagccttctactcgctgagagatccatctgaagtgatggagttcctcaatttcttggtgagatggaagaagcactcagtgtga

SEQ ID NO: 1142 - protein, 371 aa, Oryza sativa
  misc_feature: Ceres ANNOT ID no.1692728
  misc_feature: Bit score of 896.0 for HMM based on sequences of FIGURE 9.
  misc_feature (119)..(354): Pfam Name: Trehalose_PPase Pfam Description: Trehalose-phosphatase
  misc_feature: Functional Homolog Of Ceres SEEDLINE ID no. ME20095 at SEQ ID NO. 1129
MDLSNSSPVITDPVAISQQLLGGLPSNLMQFSVMPGGYSSSGMNVGVSRLKIEEVLVNGLLDAMKSSSPRRRLNVAFGEDNSSEEEDPAYSAWMAKCPSALASFKQIVASAQGKKIAVFLDYDGTLSPIVDDPDKAVMSPVMRAAVRNVAKYFPTAIVSGRSRNKVFEFVKLKELYYAGSHGMDIMAPSANHEHSAEKSKQANLFQPAHDFLPMIDEVTKSLLQVVSGIEGATVENNKFCVSVHYRNVAEKDWKLVARLVNEVLEAFPRLKVTNGRMVLEVRPVIDWDKGKAVEFLLQSLGLNDSENVIPIYIGDDRTDEDAFKVLRQRNCGYGILVSQVPKETEAFYSLRDPSEVMEFLNFLVRWKKHSV

SEQ ID NO: 1143 - DNA, 1805 bp, Triticum aestivum
  misc_feature: Ceres CLONE ID no.921110
  misc_feature: Encodes the peptide sequence at SEQ ID NO 1144
cttcccggcccccgaaccacagaccccccaaccctgctcctcccccgcctcgccgttgacgcctccccttctggtggctcgcccgcgccggcattgggttcgtcccggagaaggtctccccgtccgtgttggctgtgactctactcaattattgtccttggagcgggcccgtcagatacaggagccttcctcttagggatatcaaccgggtttctcgcttgctgagttggctgcgtttcatgcacgtttgcagtgacgaaaagatccccgttttttttattgataagagggttggttgagtgttctctgtttcattcttcagtccggcactctacttctgttgttggtagtttgtagtttgacaacaagactgacaggaagtcttgtcctgtttatggatttgaagacaagccacaactctcctgtttttgttgatcctctcccttcactagccttgcctatgacgtacacaacacctactagcttcccatcttctgggctttacctgaacaccccaaagaagaaacctcttcccagcaagatcgaagaggttcgtgctgccggatggcttgatctgatgctcgcctcatcacctcctcgtaagaggcaaagcaaggacttcttaccccatgatgttcaagctgatgatcttgatttgcggtatcgtaattggatggtgaattatccttctgcgttaggctccttcgaggcaattactgagcttgcccgcgggaaaaatatggcattgtttcttgattatgatggaactctttcgcctattgtggacaatcctgcaaatgcagtaatgtctgacgagatgcgtgctgctgtgaggcatgtagcatcacttttcccgactgcaatcattagtggaagatctcgtgacaaggtatttgactttgtgaaactaaccgagctgtactacgccggaagtcatggaatggacatcatggggcctattaggaagtctgagtccaatggtcaccatgtggaatgtgttaggtccactgattcagagggtaaagaggtcaatctcttccaacctgcaagtgagtttttacctatgatagctgaggtgttcgaaaatcttagtgagagtataaagggcatcgaaggtgcaaggatggaagataacaagttctgcgtgtctgtgcattatcgaaacgttgcaccacatgactacgaaacagttcatcagcgtgtaactgctgttctgaaggattacccttgtcttaggcttacccatgggaggaaggttcttgaagttcgccctgtcattgactggaacaaggggaaagctgtggaatttttgcttgaatcgcttggactaaacgagagcgacgatgttcttcccatctatgtcggagatgacaagactgacgaagatgcattcaaggttctgaaagcgaacaaccatggctttggaattctggtttcatctgtgcccaaggacagtgatgccttctattccctgagggatccatctgaggtgatggaattcctgaggacattggcagcatggaaggagggttctagctgagcagacgggaagaacggttttgctgacctggagaagcccccaattatatatacaagctaaccaaataagttggctgatataagagagtcaggccaaagcttttttgatttggcattttgtaaatgtggctgccactttttttggcaccacttttcgtcttttgttaatgggacttatcagtttcattcttttattgttaaaagtttcttttagtatatatcaatataagctgaaatttttcctgctggcaaaaaaaaaaaaaaaa

SEQ ID NO: 1144 - protein, 381 aa, Triticum aestivum
  misc_feature: Ceres CLONE ID no.921110
  misc_feature: Bit score of 892.4 for HMM based on sequences of FIGURE 9.
  misc_feature (119)..(364): Pfam Name: Trehalose_PPase Pfam Description: Trehalose-phosphatase
  misc_feature: Functional Homolog Of Ceres SEEDLINE ID no. ME20095 at SEQ ID NO. 1129
MDLKTSHNSPVFVDPLPSLALPMTYTTPTSFPSSGLYLNTPKKKPLPSKIEEVRAAGWLDLMLASSPPRKRQSKDFLPHDVQADDLDLRYRNWMVNYPSALGSFEAITELARGKNMALFLDYDGTLSPIVDNPANAVMSDEMRAAVRHVASLFPTAIISGRSRDKVFDFVKLTELYYAGSHGMDIMGPIRKSESNGHHVECVRSTDSEGKEVNLFQPASEFLPMIAEVFENLSESIKGIEGARMEDNKFCVSVHYRNVAPHDYETVHQRVTAVLKDYPCLRLTHGRKVLEVRPVIDWNKGKAVEFLLESLGLNESDDVLPIYVGDDKTDEDAFKVLKANNHGFGILVSSVPKDSDAFYSLRDPSEVMEFLRTLAAWKEGSS

SEQ ID NO: 1145 - DNA, 1728 bp, Panicum virgatum
  misc_feature: Ceres CLONE ID no.1791180
  misc_feature: Encodes the peptide sequence at SEQ ID NO 1146
actccattctcctcttcctcctctctaggcgaattggatcgcgcatcccgtgttcatttcgactttgaagccctccattgcattaagtggtgctttctgaatatcgaatcgcgacagagtttggtttttatggccatccctatgaagcaatcgggattcctgatatagatgtttccttgttctgaacatgagaagttctcaggtattctgctgttgatgaactgcctccacacctgcagtgacaagaaaacgctgaagaagtggtttttcatcgacaagacagtaggctgaattccagtacagagaaagaaacaacgctcgacacatttttttccttgattcatccgtcatccccaatggatatgagcaccagctcacctgtcatcaccgatccggtatcgataagccccccactgttaggaagcttgacgtcaaacatgatgccgttttcagtcatgtccggaggctgctccagtcccggcatgaacgtgagcgccagtaggcgtaagatcgaagaggtccttgtcaatggcctgttggatgcaatgaaatcctcatcgccgcgcaagaagcacaatcttgccttcggcccgggcggttcacctgacgaagatcctgcttatactgcatggatgtcaaaatgcccttctgctctgacgtccttcaagcagatagtagccaatgcacatggaaggaagattgctgtgtttttggattacgatggtaccttatcgcctatagtggatgatcccgacaaagcattcatgtcccccgcgatgagagctgctatgagaaatgttgcaaagtacttccctacagcaattgtcagcggaagatcccgcaagaaggtgtgtgaatttgtaaaactgaaggaactatgctatgccggaagtcatgggatggacatagtgacatctgcaccagaacacaatactgaaaagggcaaagaagccaatctcttccaacctgctttggagttccttcctatgattgatgaggtttccaaatccctcttggaggccacaagtggaattaaaggtgcgaatgttgagaacaacaagttctgtgtatctgtacattaccgcaacgtagcagagaaggactggaaagtggttgcacgactcgtaaacgaagtcttggaggcctttcctcgtctcaaagtaaccaatggacgaatggttttagaggttcgtccagtgatcgactgggacaagggaaaggccgtcgagttcctgcttcaatcgctcggcttaaacgattctgaaaatgtgattcccatctacatcggagatgatcgaacagacgaagacgcattcaaggtacttcgaaagcgaaactgtggatacgggatactagtttcccaggtgcccaaggacactgaagccttctactcgctgagagacccatctgaagtgatggcgttcctcaattccttggtgagatggaagaagcactcactgtgacgaaaccgaaaaatacgattggttgatccagaagtcgtgaaaataactgtagttcgtgctggcggcaattttgtagagttggacacaacgggtggctcattctttcatgtctatcattgttttcttttgtttggttcgtgctctgctctttgccactgagaaatgatcagtggttgcctcgccctcttgcaactgttatttgtaagcaagaggggcctcttttccttttcagactggtgaataaaactgagacgcttaacttgtt

SEQ ID NO: 1146 - protein, 368 aa, Panicum virgatum
  misc_feature: Ceres CLONE ID no.1791180
  misc_feature: Bit score of 892.6 for HMM based on sequences of FIGURE 9.
  misc_feature (118)..(351): Pfam Name: Trehalose_PPase Pfam Description: Trehalose-phosphatase
  misc_feature: Functional Homolog Of Ceres SEEDLINE ID no. ME20095 at SEQ ID NO. 1129
MDMSTSSPVITDPVSISPPLLGSLTSNMMPFSVMSGGCSSPGMNVSASRRKIEEVLVNGLLDAMKSSSPRKKHNLAFGPGGSPDEDPAYTAWMSKCPSALTSFKQIVANAHGRKIAVFLDYDGTLSPIVDDPDKAFMSPAMRAAMRNVAKYFPTAIVSGRSRKKVCEFVKLKELCYAGSHGMDIVTSAPEHNTEKGKEANLFQPALEFLPMIDEVSKSLLEATSGIKGANVENNKFCVSVHYRNVAEKDWKVVARLVNEVLEAFPRLKVTNGRMVLEVRPVIDWDKGKAVEFLLQSLGLNDSENVIPIYIGDDRTDEDAFKVLRKRNCGYGILVSQVPKDTEAFYSLRDPSEVMAFLNSLVRWKKHSL

SEQ ID NO: 1147 - DNA, 1522 bp, Glycine max
  misc_feature: Ceres CLONE ID no.527891
  misc_feature: Encodes the peptide sequence at SEQ ID NO 1148
gatgtgaccaaccattgctttctcttttcagttctcttctcctctctgcgcgacacagcacttcgtcactttcctttttttccattctcatagcgtttttgtgttttcaagcaagcgagaactcatctgttgataaactgctacctcaagcagtgacaagaaaagtggtggaagtttgatagactttatagttcaatttgttctgaatactccttaaaaaaaaaggtcttacattgttgctgcactgtgaaattgtgcatagacctggatccaatggacctgaagccaaatcttaaccctgtccttactgatgccacacccttaacaaggtcaaggctgggtgtgccttctggtttatcaccttactctcctataggggcaacctttccccatggtaacatgctggcaattccaaggaagaagacaggaattcttgacgattttcgttctagcggttggctcgatgcaatgaaatcgtcttctcctactcacactaaggtatccaaggatgttagtcatgggattggatcacctgattctgcttatagtacctggctgctaaagtttccatcagcactagcatcttttgatcaaattaccaactgtgcaaaagggaagagaatagcattgtttctggattatgatgggactctttcacccattgtggataatcctgactctgctttcatgtcagacaatatgcgtgctgctgttaaaatagtggcggaatattttccaaccgcgataattagtggaagaagccgtgacaaggtatatgaatttgttggagtaagtgatctatgttatgctggtagtcatggtatggacattattggtccttctagacaatctatttctgataatcaccctgattgcattagttctgctgacaagcagggtgttcaagttaatttattccaacctgctgctgaattcctgcccatgattaatgaggtacttgggttgctcaaggagtgcacagaagatattgaaggagcaacagttgagaacaacaaattttgtgtgtctgtgcattaccgcaatgtagatgaggagagttggcaaattgtgggacaacgtgtatatgatgttctgaaggagtatccacgtttgcgtttaactcatgggcggaaggttttagaggttcggccagtgattgactgggataagggaaaagctgtcacatttttactcgagtcacttggacttaattgtgatgacgtgctcgctatttatgttggggatgatagaacagatgaagatgcatttaaggttttgaaagaagctaataaaggttgtggcatcttagtgtcccgtgccccaaaagaaagcaacgcaatttactctcttcgtgatccctctgaggtcatggaatttctgacatcacttgcggaatggaaatcaagcattcaagctcgctgaaaagatttacatattgtatagaggagaacatactccactatgctatatattagagacagtcttttgtttttagtttgaattttttgttagaagactttcc

SEQ ID NO: 1148 - protein, 382 aa, Glycine max
  misc_feature: Ceres CLONE ID no.527891
  misc_feature: Bit score of 933.1 for HMM based on sequences of FIGURE 9.
  misc_feature (120)..(363): Pfam Name: Trehalose_PPase Pfam Description: Trehalose-phosphatase
  misc_feature: Functional Homolog Of Ceres SEEDLINE ID no. ME20095 at SEQ ID NO. 1129
MDLKPNLNPVLTDATPLTRSRLGVPSGLSPYSPIGATFPHGNMLAIPRKKTGILDDFRSSGWLDAMKSSSPTHTKVSKDVSHGIGSPDSAYSTWLLKFPSALASFDQITNCAKGKRIALFLDYDGTLSPIVDNPDSAFMSDNMRAAVKIVAEYFPTAIISGRSRDKVYEFVGVSDLCYAGSHGMDIIGPSRQSISDNHPDCISSADKQGVQVNLFQPAAEFLPMINEVLGLLKECTEDIEGATVENNKFCVSVHYRNVDEESWQIVGQRVYDVLKEYPRLRLTHGRKVLEVRPVIDWDKGKAVTFLLESLGLNCDDVLAIYVGDDRTDEDAFKVLKEANKGCGILVSRAPKESNAIYSLRDPSEVMEFLTSLAEWKSSIQAR

SEQ ID NO: 1149 - DNA, 1164 bp, Populus balsamifera subsp. trichocarpa
  misc_feature: Ceres ANNOT ID no.1522414
  misc_feature: Encodes the peptide sequence at SEQ ID NO 1150
atggacctcaaatcaaatcataatgctcctgtgctcactgattctgctcccctaagcaagtcaaggctacgcgggtaccaccatggtttgatgctgccgtactcaccctcaggtgcacctttctcgtcaaatctattactatctattcctaggaggaaaactggagtgcttgatgatgttcgctcctgtggttggctggatgccatgaaatcatcatctcctactcataagaagtttgccaaggatattaaccatgagctttccgcacctgatccagaagttgcctatcgcacctggctgcttaaatatccatctgcgcttgcatctttcgagcaaattgcaaactttgcaaaaggcaagagaatcgccttatttctggattatgatggtactctttcaccaattgttgaaaatcctgacaatgccttcatgtctgctgatatgcgttccattgtaaaggaagtggcaaaatatttcccaacagcaataatcagtggaagaagccgtgacaaggtgtatgagtttgtagggcttacagaactctactatgcgggtagtcatggtatggatatcatgggccctgtcaggcaatctgtatctgacgaccaccgaaattgtatcaagtctacggacaagcagggcaacgaagttaacttattccagcctgcaagagaatttttacctatgattgacgaggtttatagttcccttgtcaggattaccgaagatattaaaggggcaacagttgagaacaataaattctgtgtctctgtacattaccgtaacgttgatcaagataactggaaatcagttggggagcgtgtccaggatgtcataaagaagtatcctcgcctgcgattgactcatgggaggaaggttttagaaatccgtcccgcgatcaattgggacaaggggaaagctcttgaatttctacttgaatcactagatctcagcaattgtgatgatgtgctgccgatttatgttggagatgaccggacagatgaagatgcatttaaggttttgagagagaggaactgtggttatggcatttttgtatcaaaatcaccgaaggaaagcaatgcgtattactctctcagagacccagcagaggtcatggagtttctcaagtccctggtgacatggaagaaatcgagtgctttataa

SEQ ID NO: 1150 - protein, 387 aa, Populus balsamifera subsp. trichocarpa
  misc_feature: Ceres ANNOT ID no.1522414
  misc_feature: Bit score of 975.0 for HMM based on sequences of FIGURE 9.
  misc_feature (125)..(369): Pfam Name: Trehalose_PPase Pfam Description: Trehalose-phosphatase
  misc_feature: Functional Homolog Of Ceres SEEDLINE ID no. ME20095 at SEQ ID NO. 1129
MDLKSNHNAPVLTDSAPLSKSRLRGYHHGLMLPYSPSGAPFSSNLLLSIPRRKTGVLDDVRSCGWLDAMKSSSPTHKKFAKDINHELSAPDPEVAYRTWLLKYPSALASFEQIANFAKGKRIALFLDYDGTLSPIVENPDNAFMSADMRSIVKEVAKYFPTAIISGRSRDKVYEFVGLTELYYAGSHGMDIMGPVRQSVSDDHRNCIKSTDKQGNEVNLFQPAREFLPMIDEVYSSLVRITEDIKGATVENNKFCVSVHYRNVDQDNWKSVGERVQDVIKKYPRLRLTHGRKVLEIRPAINWDKGKALEFLLESLDLSNCDDVLPIYVGDDRTDEDAFKVLRERNCGYGIFVSKSPKESNAYYSLRDPAEVMEFLKSLVTWKKSSAL

SEQ ID NO: 1151 - protein, 352 aa, Oryza sativa subsp. indica
  misc_feature: Public GI ID no.125540573
  misc_feature: Bit score of 807.6 for HMM based on sequences of FIGURE 9.
  misc_feature (119)..(335): Pfam Name: Trehalose_PPase Pfam Description: Trehalose-phosphatase
  misc_feature: Functional Homolog Of Ceres SEEDLINE ID no. ME20095 at SEQ ID NO. 1129
MDLSNSSPVITDPVAISQQLLGGLPSNLMQFSVMPGGYSSSGMNVGVSRLKIEEVLVNGLLDAMKSSSPRRRLNVAFGEDNSSEEEDPAYSAWMAKCPSALASFKQIVASAQGKKIAVFLDYDGTLSPIVDDPDKAVMSPVMRAAVRNVAKYFPTAIVSGRSRNKVFEFVKLKELYYAGSHGMDIMAPSANHEHSAEKVTKSLLQVVSGIEGATVENNKFCVSVHYRNVAEKDWKLVARLVNEVLEAFPRLKVTNGRMVLEVRPVIDWDKGKAVEFLLQSLGLNDSENVIPIYIGDDRTDEDAFKVLRQRNCGYGILVSQVPKETEAFYSLRDPSEVMEFLNFLVRWKKHSV

SEQ ID NO: 1152 - protein, 370 aa, Oryza sativa subsp. indica
  misc_feature: Public GI ID no.125561519
  misc_feature: Bit score of 669.6 for HMM based on sequences of FIGURE 9.
  misc_feature (114)..(348): Pfam Name: Trehalose_PPase Pfam Description: Trehalose-phosphatase
  misc_feature: Functional Homolog Of Ceres SEEDLINE ID no. ME20095 at SEQ ID NO. 1129
MTKQSVVLPEVAVPVPPNSAPLLPYPPPRAAPGVAVRKKYLQAQLDLGAGLPLINGWVESMRASSPTHAKAAAALAAAGAVDDERAAWMVRHPSALSKFEQIVAASKGKKIVMFLDYDGTLSPIVDDPDSAFMSDTMRRAVRSVAKHFPTAIVSGRCRDKVFEFVKLAELYYAGSHGMDIKGPAKASRHNKAKAKGVLFQPASEFLPMIEQVHDSLIERTKCIPGAKVENNKFCVSVHFRCVDEKSWSTLADIVKAELKDYPKLKLTQGRMVFEIRPTIKWDKGKALEFLLESLGFADCTNVLPVYIGDDRTDEDAFKVLRKRGQGIGILVSKYPKDTNASYSLQEPAEVMEFLLRLVEWERLSRARPKW

SEQ ID NO: 1153 - protein, 357 aa, Oryza sativa subsp. indica
  misc_feature: Public GI ID no.125528345
  misc_feature: Bit score of 628.8 for HMM based on sequences of FIGURE 9.
  misc_feature (103)..(330): Pfam Name: Trehalose_PPase Pfam Description: Trehalose-phosphatase
  misc_feature: Functional Homolog Of Ceres SEEDLINE ID no. ME20095 at SEQ ID NO. 1129
MGIAAGAALPGGPAGPAGGLFACRSAAASMRQTYLDLAAAAVAARSASCTSWADAMRASSPTRSSRSASDVDEFTAWVRKHPSALSKFEEIAAKSRGKKIVMFMDYDGTLSPIVADPDTAYMSDAMRAAVREVAKTFPTAIVSGRCRDKVRNFVGLSDLYYAGSHGMDIKGPSSNPESALCQPASEFLPMIDEVYKTLVEKTKSTPGAKVENNKFCLSVHFRCVDEKRWNALGEQVKAVIKEYPKLKLTQGRKVLEIRPSIKWDKGKALEFLLESLGFANCGDVLPVYIGDDRTDEDAFKVLRKRGQGLGILVSKCPKDTNASYSLQDPTEVMEFLLRLVEWKRKSSSSSLMIRPRV

SEQ ID NO: 1154 - protein, 349 aa, Oryza sativa subsp. indica
  misc_feature: Public GI ID no.116310408
  misc_feature: Bit score of 574.7 for HMM based on sequences of FIGURE 9.
  misc_feature (94)..(329): Pfam Name: Trehalose_PPase Pfam Description: Trehalose-phosphatase
  misc_feature: Functional Homolog Of Ceres SEEDLINE ID no. ME20095 at SEQ ID NO. 1129
MKISANFLLNNCARTYTNKKTLKKCKRELVEVVDGLVGVMMTSSNREKPDIESGYDDSSDEDSTENSRAEICPSALCFFDQIVASAQDKKVVLFLDYDGTLSPIVNDPEKAFMSSEMRATVKSVAKHFPTAIVSGRSRDKVFDFVKLTEIYYAGSHGMDILASFADSDSTIEKTKETKLFQPANEFLTMITEVSKSLIEVTKAIKGATVENNKFCVSVHYRNVDKKNWKLVAQVVNNVLKDFPSLKVSTGRKVLEVRPMINWDKGKAVEFLLRSLGLDDSETVLPIYIGDDKTDEDAFKVLRERKNGCGILVSQVPKKSEAFFMLRGPSEVVILPVMLNFFAALLIMPS

SEQ ID NO: 1155 - DNA, 1396 bp, Arabidopsis thaliana
  misc_feature: Ceres CLONE ID no.255364
  misc_feature: Encodes the peptide sequence at SEQ ID NO 1069
aatgtattaagacttgacaacttgtctttctcacaccaaacccctctcctctgtttcataacatcttctctttttttttttcctaagcccctaatgacaaaccataatgccttaatctctgatgctaaaggcagcatcggagttgcggttagagttccaaaccaatctctgttttctcccggaggtggccgatacatcagcattccccggaagaaactcgtgcagaagctagaggccgacccgagtcaaacccgtatccacacttggatcgaagccatgagggcttcttccccaacccgtacccgaccggggaacatatctcccctcacggagtccgatgaggaggatgaatactcttcttggatggctcaacacccgtcagctttaaccatgtttgaagagatagctgaagcttcaaaagggaaacaaatcgtgatgtttctcgactatgacggtacattatcccccattgttgaaaaccctgatcgagcttacatgtctgaagagatgagagaggcagtgaaaggcgtggctagatatttcccgaccgcgattgtcactggaagatgccgtgataaggttcgtagatttgtgaaacttcccggactttactatgcaggtagccatggaatggacatcaaaggaccttccaaaagaaacaaacataataagaacaataaaggagttcttttccaagcggcgaatgagtttttgcctatgattgacaaggtctctaagtgtctagtagagaaaatgagagacatagaaggagcaaacgtcgagaacaacaagttttgtgtctccgtacattaccgttgtgttgatcaaaaggactggggattggtagcggaacacgtgacatcgatattgagtgagtatccgaaactgagtttgacacaaggaagaaaagtcttagagattcgaccaaccatcaaatgggataaaggcaaagctctcgagttcttgctcgaatccttaggattcgctaactctaacgatgttttgcccatctatataggagatgatcgtacggacgaggatgctttcaaggttttgagaaacaaaggacaaggctttggtatacttgtgtccaaaattccaaaggaaacgagtgctacatattctctacaagaaccttccgaggtaggagagtttttgcagcgactcgtggaatggaaacaaatgtcactaagaggaagatagccaatttcctgacataaatttattttcaattaataaatgaattagttttcactatgcaacaaaaattgttgtatatatgatcaatgtttttttaattattttactcttcatgaacaaatgtaagtttataggaactttcttaaccaagaaaaaaagtaagtttgctatataatattttcatcattctcttttt

SEQ ID NO: 1156 - protein, 382 aa, Oryza sativa subsp. japonica
  misc_feature: Public GI ID no.115483332
  misc_feature: Bit score of 849.9 for HMM based on sequences of FIGURE 9.
  misc_feature (120)..(365): Pfam Name: Trehalose_PPase Pfam Description: Trehalose-phosphatase
  misc_feature: Functional Homolog Of Ceres SEEDLINE ID no. ME20095 at SEQ ID NO. 1129
MDLKTSNSPVIADPLPKLALPSAVMTYTTPTSFPSTGLYLNTPKKKPLPGKIEEVRAAGWLDLMLASSPPRKRQTKDFANDVQADELDLLYRNWVVNHPSALTSFEDIVNLARGKRLALFLDYDGTLSPIVDNPENAVMSDEMRSAVKHVASLFPTAIISGRSRDKVFDFVKLTELYYAGSHGMDIMGPVRKSDSSGQHVECIRSTDSEGKEVNLFQPASEFLPMISEVYKKLSESIKDIDGARMEDNKFCVSVHYRNVAPHDYGEVHQRVTAVLKNYPCLRLTHGRKVLEVRPVIDWNKGKAVEFLLESLGLCGKEDVLPIYVGDDKTDEDAFKVLKANSIGFGILVSSVPKDTDAFYSVRDPAEVMEFLKKLASWKEEST

SEQ ID NO: 1157 - protein, 358 aa, Oryza sativa subsp. japonica
  misc_feature: Public GI ID no.125575640
  misc_feature: Bit score of 786.1 for HMM based on sequences of FIGURE 9.
  misc_feature (96)..(341): Pfam Name: Trehalose_PPase Pfam Description: Trehalose-phosphatase
  misc_feature: Functional Homolog Of Ceres SEEDLINE ID no. ME20095 at SEQ ID NO. 1129
MTYTTPTSFPSTGLYLNTPKKKPLPGKIEEVRAAGWLDLMLASSPPRKRQTKDFANDVQADELDLLYRNWVVNHPSALTSFEDIVNLARGKRLALFLDYDGTLSPIVDNPENAVMSDEMRSAVKHVASLFPTAIISGRSRDKVFDFVKLTELYYAGSHGMDIMGPVRKSDSSGQHVECIRSTDSEGKEVNLFQPASEFLPMISEVYKKLSESIKDIDGARMEDNKFCVSVHYRNVAPHDYGEVHQRVTAVLKNYPCLRLTHGRKVLEVRPVIDWNKGKAVEFLLESLGLCGKEDVLPIYVGDDKTDEDAFKVLKANSIGFGILVSSVPKDTDAFYSVRDPAEVMEFLKKLASWKEEST

SEQ ID NO: 1158 - protein, 370 aa, Oryza sativa subsp. japonica
  misc_feature: Public GI ID no.115476368
  misc_feature: Bit score of 669.2 for HMM based on sequences of FIGURE 9.
  misc_feature (114)..(348): Pfam Name: Trehalose_PPase Pfam Description: Trehalose-phosphatase
  misc_feature: Functional Homolog Of Ceres SEEDLINE ID no. ME20095 at SEQ ID NO. 1129
MTKQSVVVPEVAVPMPPNSAPLLPYPPPRAAPGVAVRKKYLQAQLDLGAGLPLINGWVESMRASSPTHAKAAAALAAAGAVDDERAAWMVRHPSALSKFEQIVAASKGKKIVMFLDYDGTLSPIVDDPDSAFMSDTMRRAVRSVAKHFPTAIVSGRCRDKVFEFVKLAELYYAGSHGMDIKGPAKASRHNKAKAKGVLFQPASEFLPMIEQVHDSLIERTKCIPGAKVENNKFCVSVHFRCVDEKSWSTLADIVKAELKDYPKLKLTQGRMVFEIRPTIKWDKGKALEFLLESLGFADCTNVLPVYIGDDRTDEDAFKVLRKRGQGIGILVSKYPKDTNASYSLQEPAEVMEFLLRLVEWERLSRARPKW

SEQ ID NO: 1159 - protein, 464 aa, Oryza sativa subsp. japonica
  misc_feature: Public GI ID no.115478841
  misc_feature: Bit score of 522.1 for HMM based on sequences of FIGURE 9.
  misc_feature (150)..(413): Pfam Name: Trehalose_PPase Pfam Description: Trehalose-phosphatase
  misc_feature: Functional Homolog Of Ceres SEEDLINE ID no. ME20095 at SEQ ID NO. 1129
MAKASVVVPEQVGAAAAAQVGCPCPGTTLFPYPPPRAGIAVRRKCLQAAQQLELGAGLRGGWVESMRASSPTHAKAAAALAAGVDEEHAAWMVRFRSPIDRCSSRSWRARADTDMNRAFPFVFVQARHPSALGEFEKVVAASKGKQIVMFLDYDGTLSPIVDDPDAAFMSETVSLSSPPLSPTLLLHSSSSHTSLLPHQMRMAVRSVAKHFPTAIVSGRCRDKVFEFVKLAELYYAGSHGMDIKGPASRHAAAKSPPHNKGVLFQPASEFLPMIEQVHQRLEQATSSIPGAKVENNKFCVSVHFRCVDEKSWGALAETVRRVVREFPRLRLSQGRMVFEVRPTIKWDKGKALEFLLDSLGFADCSDVLPVYIGDDRTDEDAFKVLRRRGQGVGILVSKHPKETSASFSLQEPAELKKSSVHYPLPAQRSNRLNRILVNWWGEGLKDKLCALEPSHEREGCMAPH

SEQ ID NO: 1160 - protein, 596 aa, Oryza sativa subsp. japonica
  misc_feature: Public GI ID no.115467158
  misc_feature: Bit score of 536.9 for HMM based on sequences of FIGURE 9.
  misc_feature (120)..(351): Pfam Name: Trehalose_PPase Pfam Description: Trehalose-phosphatase
  misc_feature: Functional Homolog Of Ceres SEEDLINE ID no. ME20095 at SEQ ID NO. 1129
MTNQDVVMPDIAAAAAMPGSSGRAPLFACRGAAAVSASSMLGGGGAAYQAAVVAHVAPVPAIRPCASWVVEAMRASSPTRPAAAAVDAEYDAWTQRKHPSALGSFEQVAAAASGKRVVVFLDYDGTLSPIVADPDMAFMSDEMRAAVRDVAEHFPAAIVTGRCVDKVQSFVGLPELYYAGSHGMDIKGPSSNEEEDTKILLQPAREFLPVINKAYKALMEKTKSTPGARVENNKFCLSVHFRCVDEKRWNPLAEQVKAVLRDYPELKLTQGRKVLEIRPSIMWDKGKAVEFLLKSLGFDDDRRDVLPVYIGDDRTDEDAFKVLRKRGQGLGILVSKCAKETDASYSLQDPAEKYTNAGAHVFVTMLLTVVFTAAVALALVNAVNSHDFAAHLAGVDCRMGLAGPVRCPASGFVELLVLALHVMRARHLRSPACLPNVALATAFDCISMYVRRWQRGEVTNVHEVYVLSRIEFVPYMASTGEQRSTGETAVGAAAAGMYRMVPLHAAKWGDKWRMSGERMAAGVDCRRREDLPSSGDGYRQEEIDGGHGVPCSIGAVEASAIIVSDAPEGLISTLTTDHIYYMTVFPAKLALTSEEV

SEQ ID NO: 1161 - protein, 365 aa, Brassica rapa subsp. pekinensis
  misc_feature: Public GI ID no.72384477
  misc_feature: Bit score of 676.1 for HMM based on sequences of FIGURE 9.
  misc_feature (107)..(341): Pfam Name: Trehalose_PPase Pfam Description: Trehalose-phosphatase
  misc_feature: Functional Homolog Of Ceres SEEDLINE ID no. ME20095 at SEQ ID NO. 1129
MVSFVVEKPQRMSNGVVSETTRLSIIPNNSSSAQKTLLKNLEIINGGQRVNAWVDSMRASSPTHLKSLPSSVSSEKHLSSWIMQHPSALEMFEKITQASGGKQIVMFLDYDGTLSPIVDDPDKAFMSSKMRRTVKKLAKCFPTAIVTGRCIDKVYNFVKLAELYYAGSHGMDIKGPAKGFSRHKRVKQSLLYQPASDYLPMIDEVYKQLLEKTKSTPGVIVENHKFTASVHFRCVEEKKWSELVLQVRSVLEKYPTLKLSQGRKVFEIRPMIDWDKGKALEFLLESLGFGNSNNVFPVYIGDDRTDEDAFKMLRVRGEGFGILVSKFPKDTDASYSLQDPSEASPHTRILYLSVPKYKMFSRADL

SEQ ID NO: 1162 - protein, 344 aa, Ostreococcus tauri
  misc_feature: Public GI ID no.116054703
  misc_feature: Bit score of 261.3 for HMM based on sequences of FIGURE 9.
  misc_feature (78)..(321): Pfam Name: Trehalose_PPase Pfam Description: Trehalose-phosphatase
  misc_feature: Functional Homolog Of Ceres SEEDLINE ID no. ME20095 at SEQ ID NO. 1129
MSYKDMGRAGPLEIRTRGPPFGGLPQAQAGMKRSDSIGTIEKYWDDDAEWYEFHPNALAREGDGKFKELAVGKLLTVFLDYDGTLTPIVDEPDKAFMDDEVREAVRQCARRFPTAIISGRSRHKVSQFVQLEELYYAGSHGLDIAGPTRTSDGTPITATALAHQPAQWARDVMDRVTNDLIEKTRDIPGANIEHNMFCVSAHYRGVSDADRPRFQKIVDEIVASDECLIKHDGKMVWEVRPRVAWDKGKALSYLRDALIPDLAKKGFGSEEVFTVYVGDDVTDEDAFMEINEKLGDHLGVGVLVSHAPKVSAAKFSLRNTPEVLQFLTTLSKLADAGEVKTLPR

SEQ ID NO: 1163 - DNA, 1891 bp, Panicum virgatum
  misc_feature: Ceres CLONE ID no.1786317
  misc_feature: Encodes the peptide sequence at SEQ ID NO 1164
cttccccgtttcggctcccaaaatccccctcctccgtcgccgcctcccgtccggtcgtctccccgcctcgttggacgttgggtggctcgccggcgcctgcattggggataatctcgccgcctctgtccgagtgcaggatctttgcgtttaatgggctggacgcagtacatgcatgtttgcagtgacaagaagacattgaaacgctggtttttcatagacaagagggttggttaagtgctcagttctgtggaaaattctgcattctggtgcactgactttgtgtagcttctaactgctcttacaacaagacttgaagggggagggagagtcgtgtcttgttgatggatttgaagacaggcctcaactcacctgttattgcagatcatctccctacattagccttgcctgctcctgtcatgactttcacaacacctactagcttcccctctccggggctttgcttgaatactacaaagaagacacctctgcctggtaagatcgaagaagttcgtgccactggatggctcgaccttatgatggctgcatcacctacccgcagaaggcagatcaaggatgtcgtcaatgacactcaagctgatgatctcgatttgcaatatcataactggatggttgactatccatctgctttgacctcatttgaggcaattactgatcttgctgggagtaaaagattggtattgtttcttgactacgatggaacgctttcaccaattgtggacaatcctgaaaatgcattaatgtctgatgagatgcgagctgctgtgaagcatgtggcatcacttttcccaactgcaatcatcagtggaaggtctcgggataaggtttttgactttgtcaagcttaatgaactacactatgctggaagtcacggaatggacataatgggccctattaggaagactgctgactccaatggcgtggaatgcattcactccactgatttgaagggtaaggaggtcaaccttttccaacctgcaagtgagtttttacccatgatcagtgaggtgtataaaaagcttggtgagagtgtcaaggacattaatggtgccaggatggaagacaacaagttctgtgtctctgtgcattaccgtaatgtggcagaagatgactataaaaaggttttccagcgtgtaactgctgttttggaagattacccttgcctaaggctaacccatggaaggaaggtttttgaggtccgtcctgtgattgattggaacaaaggtaaagctgtggagtttttactcgaatctcttgggctcaatgagagtgaagatgttctccctatctatgttggagatgacagaactgatgaagatgcattcaaggttctgaaggcaagcaaccgtggctttggaatactggtgtcatctatacccaaggagagcgatgccttctactctttgagggatccagctgaggtgatggaattcctgagaaagctggcacaatggaaggagcaatccatctgagagttgaaaaacattggtttggttggtctggtccaagagtataaatagttacaatgctaaccaaataagtcggctatttggaggagtcaggccaaaatgtttttgatttggcattttataagaggctattgcatttttctgtcccactttgttctcgtgtcagggtttctcaagcaaattcaattctttcattatttaggttcctttagtatatacggagatatttttaaaagaattttggttcctactagtgtttcgctgcctcgcagttttactgtaggtaattatctattccatgttgtattcgtgaagatgtaaagaactggttctttgtttaaacagcggttagctgtcaatgtgctataaatgtcgaagttgcgagcaaaaaaaaaaaaaaaaaa

SEQ ID NO: 1164 - protein, 382 aa, Panicum virgatum
  misc_feature: Ceres CLONE ID no.1786317
  misc_feature: Bit score of 816.6 for HMM based on sequences of FIGURE 9.
  misc_feature (121)..(365): Pfam Name: Trehalose_PPase Pfam Description: Trehalose-phosphatase
  misc_feature: Functional Homolog Of Ceres SEEDLINE ID no. ME20095 at SEQ ID NO. 1129
MDLKTGLNSPVIADHLPTLALPAPVMTFTTPTSFPSPGLCLNTTKKTPLPGKIEEVRATGWLDLMMAASPTRRRQIKDVVNDTQADDLDLQYHNWMVDYPSALTSFEAITDLAGSKRLVLFLDYDGTLSPIVDNPENALMSDEMRAAVKHVASLFPTAIISGRSRDKVFDFVKLNELHYAGSHGMDIMGPIRKTADSNGVECIHSTDLKGKEVNLFQPASEFLPMISEVYKKLGESVKDINGARMEDNKFCVSVHYRNVAEDDYKKVFQRVTAVLEDYPCLRLTHGRKVFEVRPVIDWNKGKAVEFLLESLGLNESEDVLPIYVGDDRTDEDAFKVLKASNRGFGILVSSIPKESDAFYSLRDPAEVMEFLRKLAQWKEQSI

SEQ ID NO: 1165 - DNA, 1772 bp, Panicum virgatum
  misc_feature: Ceres CLONE ID no.1791336
  misc_feature: Encodes the peptide sequence at SEQ ID NO 1166
acacaccccctccctcctcgccatcctcccacctccgctctcccagtctccggccgcgttccagcaccagcgctgaagccgctagctagccgttgctcggctcccccgacaccaccaaggctttcccttcgatcgatcgaccagcaactagccggatgacgaagcagggcgtggtggtgccggcgcccgcggaggcggccgtcgcggtgccgcccagctcggcgccgctcctcccgtacccgccgccgcgggccgccatgcgcaagaagtgcctgcagatgggacctggcgtcggcggctgggtcgagtccatgcgcgcctcctcgcccacgcacgccagggccgccgccgcgctcgccgccggcgccgacgaggaccgccgcgccgcctggatggtggagcacccgtcggcgctgagcaagttcgaccaggtggtggcggcgtccaagggcaagcagatcgtcgtcttcctcgactacgacggcacgctctcgcccatcgtcgacgaccccgacgccgcctacatgtccgacacgatgcggcgggcggtgcgcagcgtcgccaagcacttccccacggcgatcgtcagcggccggtgccgcgacaaggtgttcgagttcgtgaagctggcggagctctactacgccggcagccacggcatggacatcaagggccccgccaaaggttcccggcacaccagggccgccaagggcgtcctcttccagccggccagccagttcctgcccatgatcgagcaggtgcacgagtctctggtggagaagaccaggagcatccctggagccaaggtggagaacaacaagttctgcgtctctgtccacttcagatgcgtcgatgagaagagctggagcgcgttggcggagacggtgaagtcggtgctcaaggagtacccgaagctgaagctgacgcaggggcggatggtgttcgaggtgcggcccatcatcaagtgggacaagggcaaggccctcgagttcctgctcgagtcgctgggcttcgccgactgcgccgacgtgctccccgtctacatcggcgacgaccgcaccgacgaggacgccttcaaggtgctccgccgccgcggccagagcgtcggcatcctcgtctccaagcaccccaaggacacctccgcgtcctactcgctgcaggagcccgccgaggtgatggagttcctgctgcggctcgtcgagtgggagcgcctctccaaggcccgccccaagtggtgaccggccggccgccgccgccgctgccgccggtcgcgaggagatcgattaccagacggattagcagtatatatattatatgtatcatatatattatctttacatcttcgatcatcagggggggttaaattagaagggagcgcgtatcctggcgtgtcagcggcgcgccgctcagctccccgcgtgtggtgtcgtacgttaaccctgccgagctcaccgcgccatgtgcgtccgcgacggggggccctcccccttctttttacgggggagggcgcgccctggggttgccggggggtagaagaaggcctcggaagcttgagctttccggagccccctggcttgctagagacgatgccatctggctgctgcgcagcaaggcaaaaaaaaaaagaacaaaaaaaaacaagaagaagaagaacgtgttgctgctttagtttgtgtaattagtgctgctattattactgtggccgcctgaattctgattgtgtaaaagatgtatgaaatggagatccagctacgggaatatatatatactag

SEQ ID NO: 1166 - protein, 360 aa, Panicum virgatum
  misc_feature: Ceres CLONE ID no.1791336
  misc_feature: Bit score of 661.1 for HMM based on sequences of FIGURE 9.
  misc_feature (105)..(338): Pfam Name: Trehalose_PPase Pfam Description: Trehalose-phosphatase
  misc_feature: Functional Homolog Of Ceres SEEDLINE ID no. ME20095 at SEQ ID NO. 1129
MTKQGVVVPAPAEAAVAVPPSSAPLLPYPPPRAAMRKKCLQMGPGVGGWVESMRASSPTHARAAAALAAGADEDRRAAWMVEHPSALSKFDQVVAASKGKQIVVFLDYDGTLSPIVDDPDAAYMSDTMRRAVRSVAKHFPTAIVSGRCRDKVFEFVKLAELYYAGSHGMDIKGPAKGSRHTRAAKGVLFQPASQFLPMIEQVHESLVEKTRSIPGAKVENNKFCVSVHFRCVDEKSWSALAETVKSVLKEYPKLKLTQGRMVFEVRPIIKWDKGKALEFLLESLGFADCADVLPVYIGDDRTDEDAFKVLRRRGQSVGILVSKHPKDTSASYSLQEPAEVMEFLLRLVEWERLSKARPKW

SEQ ID NO: 1167 - DNA, 1844 bp, Panicum virgatum
  misc_feature: Ceres CLONE ID no.1877752
  misc_feature: Encodes the peptide sequence at SEQ ID NO 1168
atccacccacctcaagctctcacaactcacaggtcagaagcaaagcccgcacgctcccccaagtcctgaggcaagctagctagctgtgctcctcccgtccgagtgcctggggttgggggaaggaaggtgaggcctcgccgtcttcgcggcgcacgagcctgcacctgggccgttggtgaggcgaagcacatgacgaaccaggacgtggtcgtgtcggagatgggcattgcggccggggcggcgctgccgggaccgagcccggcgctcttggcttgccggggcgcggccgccggcgccatgtcccttcggtacctcgacctggccgcggccgccgcgcgctcggccagctgcacctgggccgacgccatgcgcgcctcgtcccccacccgctcccgcgccgccgccgatgtcgacgagttcacggcctggatgaggaagcacccgtcggcgctcggcaagttcgaccagattgccagcgcgtccaaggggaagaagatcgtcatgttcctggactacgacggcacgctctcccccatcgtcgccgaccccgacgaggcctacatgagcgacgcgatgagggcggcggtgcgcgacgtcgcgaagcacttcccgacggcgatcgtgagcgggcgctgccgcgacaaggtgcgcaacttcgtcggcctctcggagctctactacgccggcagccatggcatggacatcaagggaccaagatccaatccggagtcggtcctgtgccaacctgcaagcgagttcctcccagtgatcgacgaggtgtacaaggcgctggtggaaaagacgaagtccacacctggagccaaggtggagaacaacaagttctgcctgtccgtgcacttcagatgtgtagatgaaaagagatggaatgctttggcggagcaagtcaaggccgtcatcaaggactaccccaagctgaagctcactcaagggaggaaggttctggagatccgcccgagcatcatgtgggacaagggcaaggccttggagtttctgctcgaatcgctcggattcgccagctgcagcgacgtcctcccggtgtacatcggtgacgaccgcaccgacgaggatgctttcaaggtgctgaggaagaggggtcagggcatcggcatcctcgtctccaagtgccccaaggagaccaacgcctcctactccctgcaggacccgagcgaggtcatggacttcttgctccggctggtggagtggaagcgcaagtcgccgccgccgccgatgatccggccgcgagtgtagctggctggctcggcgcggcagccggtcggcggccggtcgactagtgaatcgacggactgatcgaatcggtgtccaatcatgcgaacataccccaccaccaatgttccccctctctgacgattcttagcttgtgtggtggcctccgaaacggactcgtggtggttgctgcgttgcacgcatgttcttcgattccctggcggggccacacacacacaacacaactcctccgcgtcactgaaaatgttggagcatgttggtgctgctgtctaatacagtaaccgtgtgtctgcttccccggcaatgtaccactagtagtacccctcccttctcgtgttatttttgtccctcgtctcatccccatgggcttggaaggcatctgcaaagctccctgccgtcctagaagagaagaacctttgcaagaaagagaaggttcccttcaccccatgtaactagcacctactatattctaggcactactgttctttgtacccttctctgctgtgtaaaatgtagtctgtaaaagtaattaagatccaagtaatggaattattttgtaaaaaaaaaaaaaaaaaaaa

SEQ ID NO: 1168 - protein, 359 aa, Panicum virgatum
  misc_feature: Ceres CLONE ID no.1877752
  misc_feature: Bit score of 632.7 for HMM based on sequences of FIGURE 9.
  misc_feature (106)..(333): Pfam Name: Trehalose_PPase Pfam Description: Trehalose-phosphatase
  misc_feature: Functional Homolog Of Ceres SEEDLINE ID no. ME20095 at SEQ ID NO. 1129
MTNQDVVVSEMGIAAGAALPGPSPALLACRGAAAGAMSLRYLDLAAAAARSASCTWADAMRASSPTRSRAAADVDEFTAWMRKHPSALGKFDQIASASKGKKIVMFLDYDGTLSPIVADPDEAYMSDAMRAAVRDVAKHFPTAIVSGRCRDKVRNFVGLSELYYAGSHGMDIKGPRSNPESVLCQPASEFLPVIDEVYKALVEKTKSTPGAKVENNKFCLSVHFRCVDEKRWNALAEQVKAVIKDYPKLKLTQGRKVLEIRPSIMWDKGKALEFLLESLGFASCSDVLPVYIGDDRTDEDAFKVLRKRGQGIGILVSKCPKETNASYSLQDPSEVMDFLLRLVEWKRKSPPPPMIRPRV

SEQ ID NO: 1169 - DNA, 1511 bp, Panicum virgatum
  misc_feature: Ceres CLONE ID no.1821191
  misc_feature: Encodes the peptide sequence at SEQ ID NO 1170
acaccaatcatcgccggcctcgattctctccggtcactgcctggtcagggttcttgtttccttgcgtagatcgatcacgatcaggacgtgagttccgagcgatggcgaagccgagcgtgggcgtctcggaagtgggggtctcggcggcggcggcgcaggcggcgtgcccctgccccgggacgctgttcccgtacccgccgccgcgcggcgccgggatcgccgcctccgtgcggcgcaagtgcctgcaggtggagctcggcggcggggcggcggggctgctgggcggcgcctggggcgtcgagtcgatgcgcgcgtcgtcgcccacgcacgccaaggccgtggcggccctcgccggcggcgtggacgacgagcgcgcggcgtggatggtgcggcacccgtcggcgctgggcaagttcgagcagatcgtggcggcgtccgagggcaagcgcatcgtgatgttcctggactacgacggcaccctgtcgcccatcgtggacgaccccgacgccgccttcatgagcgagacgatgaggatggccgtgcgcagcgtcgccragcacttcccgacggcgatcgtgagcggccggtgccgcgacaaggtgttcgagttcgtgaagctggcggagctctactacgcggggagccacggcatggacatcaagggcccggccaaggcctcttcccggcacgcaaaggccaaggcgaagggcggaggagtcctgttccaaccggcgagcgagttcctgccgatgatccaggaggtgcacgagcgcctggccgagacgacgcgctgcatcccgggggccaaggtggagaacaacaagttctgcgtctccgtccacttcagatgcgtcgacgaaaagatgtggggcgagctgtcggaggcggtgaagggcgtgctgcgggggtacccgaggctgcggctgacgcaggggcggatggtgctggaggtgcggcccaccatgaagtgggacaagggccgggcgctcgagtttctgctcgagtcgctgggcttcgccgactgcgccaacgtcctgcccgtctacatcggcgacgaccgcaccgacgaggacgccttcaaggccctgcggcggcgggggcagggcgtgggcatcctcgtctccaagcaccccaaggagacgaccgccaactactcgctccgggagcccgccgaggtcatggagttcctgctgcgcctcgtcgagtggaagcgactctccaggaccagcctcaggctcaggctgcaatgacgacgactcttcttgcactataccctgcaggacgtacaatgcggcgcggatcgatgcaactcaaagctgattaattgcgtgattggaattggatctaacactgattgttgcacttgtaccatctcgatctcgtggagtgcgagagctctgttttcctctccattcttcttttttccccagggccggaacgggtgtatgtacattctgtagttgatgatattatacctacaagaggaattatacgtgtcccgttaccattcc

SEQ ID NO: 1170 - protein, 382 aa, Panicum virgatum
  misc_feature: Ceres CLONE ID no.1821191
  misc_feature: Bit score of 642.5 for HMM based on sequences of FIGURE 9.
  misc_feature (120)..(357): Pfam Name: Trehalose_PPase Pfam Description: Trehalose-phosphatase
  misc_feature: Functional Homolog Of Ceres SEEDLINE ID no. ME20095 at SEQ ID NO. 1129
  misc_feature (152)..(152): Xaa is any aa, unknown, or other
MAKPSVGVSEVGVSAAAAQAACPCPGTLFPYPPPRGAGIAASVRRKCLQVELGGGAAGLLGGAWGVESMRASSPTHAKAVAALAGGVDDERAAWMVRHPSALGKFEQIVAASEGKRIVMFLDYDGTLSPIVDDPDAAFMSETMRMAVRSVAXHFPTAIVSGRCRDKVFEFVKLAELYYAGSHGMDIKGPAKASSRHAKAKAKGGGVLFQPASEFLPMIQEVHERLAETTRCIPGAKVENNKFCVSVHFRCVDEKMWGELSEAVKGVLRGYPRLRLTQGRMVLEVRPTMKWDKGRALEFLLESLGFADCANVLPVYIGDDRTDEDAFKALRRRGQGVGILVSKHPKETTANYSLREPAEVMEFLLRLVEWKRLSRTSLRLRLQ

SEQ ID NO: 1171 - DNA, 1883 bp, Zea mays
  misc_feature: Ceres CLONE ID no.446838
  misc_feature: Encodes the peptide sequence at SEQ ID NO 1172
ctcctttctctcccagctcccaaaattccctctccgtcgccgccgctcccaaaatcccctctccgtcgccgcctctcgccaggtcgtttccaagccccgttgggggcctcgccggcgccggcattggatataacctcgcccgctacctccgtccgaatgcagggccttgatatttaatgggctggaggtggtacatgcatgttcgcagtgacaagaacacattgaaacgttggtttttcattgacaagaggcttgttaaagcatttttggtgcactaaccttttgttgtctgtaattggtttcacaacaagtttcttggggggttgtgtcctgttgatggatttgaagacaggcctcaattcacctgttattgctgaccatctccctacgttagcattgcctgctgctgtcatgactttcacaacacctactagctttccctctccggggctttgcttgaacactacaaagaagatacctctgcctggtaagattgaagaagttcgtgctgctggatggcttgatctcatgaaggcctcatcacctacccgcaaaaggcagatcaaggatgtcatctgtgatgctcaatctgatcttgatttgcaatactgcaactggacagtgaactatccttctgctttgatctcatttgaggcaattagtgatcttgctgggagtaaaaggttggcattgtttcttgactatgacggaacactttcaccgattgtggacaatcctgaaaatgcattaatgtctgatgagatgcgtgctgcagtgaggcatgcggcatcacttttcccaactgcaatcattagcggaagatctcgtgataaggtttttgactttgtgaagctaaatgaattgtactacgctggaagccatggaatggacataatgggccctgttaggaagactactgactccaatggcgtggaatgtattcggtcaactgatgtgcatggtaaagaagtcaacctgttccaacctgctagtgagtttttacctatgatcactgaggtgtatgaaaaacttggtgagagtgttaaggacattgatggtgcaaggatggaagacaacaagttctgtgtatctgtgcattaccgtaatgtggcggaagatgactataaaaaggttttccatcgtgtaactgctgttttggaaggttacccttgcctaagactaacccatgggaggaaggtttttgaggtccgtcctgttattgattggaacaaaggtaaagctgtggagtttttacttgaatcgcttgggctcagcgagagtgaagatgttctccctatctatgttggagatgacagaacagatgaagatgcattcaaagttctgaaggcaagcaaccgtggctttggaatattggtgtcgtctatacccaaagagagtgacgccttctactccttgagggatccagctgaggtgatggaatttctgagaatgttggcagcatggaaggagcagtccacctgatatcagttttgctgggtctgagaatgtgggcagtccacaagattataaatattagcaagatatataatatataatgctaatcaaataaatcggctattaggaggactcgagccatttttttgatttggcattttataagaggctaccacatttccatactttttcagtcccactttgttcttgtgttaaatgggttttcaaacagttcaattctttcattatttaggttccttaagtatatatgcaaatattcttaaaagggattttttggttccttctagtgtttcactgtgttgcgatttttgtattctgcaatctgtaaagaaccggttcttcgtataaacagcatttgacaatgcctcatggaaagtcaagttatgagcaaaaaaaaaaaaaaaaaa

SEQ ID NO: 1172 - protein, 381 aa, Zea mays
  misc_feature: Ceres CLONE ID no.446838
  misc_feature: Bit score of 804.8 for HMM based on sequences of FIGURE 9.
  misc_feature (120)..(364): Pfam Name: Trehalose_PPase Pfam Description: Trehalose-phosphatase
  misc_feature: Functional Homolog Of Ceres SEEDLINE ID no. ME20095 at SEQ ID NO. 1129
MDLKTGLNSPVIADHLPTLALPAAVMTFTTPTSFPSPGLCLNTTKKIPLPGKIEEVRAAGWLDLMKASSPTRKRQIKDVICDAQSDLDLQYCNWTVNYPSALISFEAISDLAGSKRLALFLDYDGTLSPIVDNPENALMSDEMRAAVRHAASLFPTAIISGRSRDKVFDFVKLNELYYAGSHGMDIMGPVRKTTDSNGVECIRSTDVHGKEVNLFQPASEFLPMITEVYEKLGESVKDIDGARMEDNKFCVSVHYRNVAEDDYKKVFHRVTAVLEGYPCLRLTHGRKVFEVRPVIDWNKGKAVEFLLESLGLSESEDVLPIYVGDDRTDEDAFKVLKASNRGFGILVSSIPKESDAFYSLRDPAEVMEFLRMLAAWKEQST

SEQ ID NO: 1173 - DNA, 1811 bp, Zea mays
  misc_feature: Ceres CLONE ID no.1556915
  misc_feature: Encodes the peptide sequence at SEQ ID NO 1174
aaccctcctcctcctgttctcctcgcaccttctcccacctctgctctgccctgctctgctctcccaggctaggtcctgcagctgcaagcaccgaggacagacagagtcgctcgcttcgccaccactagctgttgcttgcctgccacccaaggctttccttccatcgagatcaagtagcgtagcggcttgcctgaccaagaggcagagctctcgatgacgaagcagggcatggtggtgccggtgcctgaggcggccgtggcggtaccgcccaactcggcgccgctgttccagtacccgccgccgcgggccgcgccgggcgtcgccgtgcgcaagaagtgcctgcagatgggcgccggcgtcggcgtcggcgccggcgccgggcgcatcggcggctgggtggagtccatgcgcgcgtcctcgcccacccacgccaaggcggccgccgcgctcgccgcgggcgtcgaagaggagcggtacgccgcgtggatggtgaagcacccgtcggcgctggccatgttcgaccagctggtggaggcgtccaaggggaagcagatcgtcgtgttcctcgactacgacggcacgctgtcccccatcgtcgacgaccccgacgccgcctacatgtccgacacgatgcggcgggcggtgcggagcgtcgccaagcacttcccgacggcgatcgtgagcgggcggtgccgcgacaaggtgttcgaattcgtgaagctggcggagctgtactacgccggcagccacggcatggacatcaagggccccgccaaagggtcccggcacaccaaggccaaaggcggcgttctctttcagccggccagccagttcctgcccatgatagagcaggtgcacgattctctggtggaaaagaccaagtgcatacctggagccaaggtggagaacaacaagttctgtgtgtctgtccacttcagatgcgtcgatgagaagagctggatcacgttggcggatatggtgaagtcggtgctcaaggactacccgaagctgaagctgacgcagggcaggatggtgttcgaggtccgccccaccatcaagtgggacaagggcaaggccctggagttcctcctcgagtccctcgggtacgccgactgcaccgacgtgctgcccgtgtacatcggcgacgaccgcaccgacgaggacgccttcaaggtgctccgcaagcgcgggcagggcgtgggcatcctcgtgtccaagcaccccaaggacacctgcgcctcctactcgctgcaggagcccgccgaggtgatggagttcctgctgcggcttgtcgagtgggagcgcctctccaaggcccgcccaaagtggtgatccaatccacgatgacagatgacgttcgagctgggattaattatacactaaatatgctcaatatataagttagttatactaagggtgatggattaattagagggatcgggggagcgagggagtaattaagaccgtacgcacccactcctacttgagctgagctgagctgagctgagacgacgagacgagagctcgctgcgctgtgcacggcacagtcatgtgcgtccagtccacggcgcctccctatgtttttacgggagccatgtggcggctgctgcgcggcaagggtgaagaatgtacgagctgctgtagcactccagtaattacttcctactcttactccagccatgaaccttggctctggatcctgaattctgattgtgtacaagtacaagagagcaactgctgtcgatgctatgtatgaaatcatctctataaattaagtagccagctttcctctgcaaaaaaaaaaaaaaaaa

SEQ ID NO: 1174 - protein, 372 aa, Zea mays
  misc_feature: Ceres CLONE ID no.1556915
  misc_feature: Bit score of 670.7 for HMM based on sequences of FIGURE 9.
  misc_feature (117)..(350): Pfam Name: Trehalose_PPase Pfam Description: Trehalose-phosphatase
  misc_feature: Functional Homolog Of Ceres SEEDLINE ID no. ME20095 at SEQ ID NO. 1129
MTKQGMVVPVPEAAVAVPPNSAPLFQYPPPRAAPGVAVRKKCLQMGAGVGVGAGAGRIGGWVESMRASSPTHAKAAAALAAGVEEERYAAWMVKHPSALAMFDQLVEASKGKQIVVFLDYDGTLSPIVDDPDAAYMSDTMRRAVRSVAKHFPTAIVSGRCRDKVFEFVKLAELYYAGSHGMDIKGPAKGSRHTKAKGGVLFQPASQFLPMIEQVHDSLVEKTKCIPGAKVENNKFCVSVHFRCVDEKSWITLADMVKSVLKDYPKLKLTQGRMVFEVRPTIKWDKGKALEFLLESLGYADCTDVLPVYIGDDRTDEDAFKVLRKRGQGVGILVSKHPKDTCASYSLQEPAEVMEFLLRLVEWERLSKARPKW

SEQ ID NO: 1175 - protein, 355 aa, Zea mays
  misc_feature: Public GI ID no.90200725
  misc_feature: Bit score of 547.3 for HMM based on sequences of FIGURE 9.
  misc_feature (101)..(335): Pfam Name: Trehalose_PPase Pfam Description: Trehalose-phosphatase
  misc_feature: Functional Homolog Of Ceres SEEDLINE ID no. ME20095 at SEQ ID NO. 1129
MTKRTAFAADDAIIAAAAAVTSQPGRRFTSYPPARARGGCRLAPAAAARQATDDPGAAGSWPELVVPRHADFDDWMEKHPSALAAFESVLAAAKGKKIVMFLDYDGTLSPIVRDPDSAVMSEEMRDAVRGVAEHFPTAIVSGRCRDKVFNFVKLAELYYAGSHGMDIKGPTAQSKHTKAKAGAVLCQPARAFLPVIEEVYRALTASTAPIPGATVENNKFCLSVHFRCVQEEKWRALEEQVRSVLKEYPDLRLTKGRKVLEIRPSIKWDKGNALQFLLESLGFAGSNSVFPIYIGDDSTDEDAFKVLRNLGQGIGILVSKIPKETRASYSLREPSEVEEFLRKLVSWSKESRQRD

SEQ ID NO: 1176 - DNA, 2404 bp, Zea mays
  misc_feature: Ceres CLONE ID no.1580247
  misc_feature: Encodes the peptide sequence at SEQ ID NO 1177
accaccgcaggcaaagcttcgggcaacaacagcttgctcgactcagcgcccatctatctctcttctcccccgcctgtctagccagcggcgaccaccaccaccgttcagttattatagcaagcatgacgaagcacggcgtggtgatcggcccggaggacgtcgcggcggcgcggcatttctcgttcccgccgccgaggacggcggcgggcggcgagtcgtgcaggaagctggcggcgcaggtggacctcggccccgccgtcgtggggtcctggctcgactccatgaaggcctcgtcgcccaggcacaggctcatggcgcccgtgcccggcgccgccgacgcggagcacgacgactggatggagcggcacccgtcggcattggaccgcttcgacgcgctggcggcggcggccaaggggaagcaggtcgcggtgttcctggactacgacggcacgctgtccccgatcgtggaggaccccgaccgcgccgtcatgacggacgagatgagggacgcggtgcgcggcgtggcggcgcgcttcccgacagcgatcgtcagcgggcggtgccgggacaaggtgttcagcttcgtgcggctagcggagctctactacgccgggagccacgggatggacatccgggggcccaccgccgacgccaaccaccaccacggcaacggcaaggcggaggcggaggcggaggcggtgctctgccagccggcgagcgagttcctgccggtgatgcaggaggtgtacgcggcgctggtggccaaggtggagcgcgccatcccgggcgccaaggtggaggacaacaagttctgcctgtcggtccacttccgttgcgtggaggaggcgtgctgggccgcgctcttcgagcaggtccgcgccgtgctgagggaccacccgggcctgcgcctcacccagggccgcaaggtgctggaggtccgccccatgatccgctgggacaagggcaaggcgctggagttcctgctccacgccctcggcttcgccgccgacgccgaccgcgacgacgtcttccccatctacgtcggcgacgaccgcaccgacgaggacgccttcagggtgctgcgcgcgcgcgggcacggcgccgggatcctcgtgtccaggttccccaaggacaccagcgtccttcacgctacgcgaccccgccgaggtcaaggagttcctgcgcaagctcgtcggcgccaacgacgacagctgatgatccggcccgcgattcgtttccctttcccgccgtgaccagctccgatccgcctgtgtcaagccgctaactcaacctcggctacctacctgctgcaccggcagagggcttccttgttgttgcaactgcatctccatcgagcagcttgctttgggacaagaacagacctagctagtagtacagtagagcccttttgtatcttcgttttttttttggtttccatctctcttgttcatcatgcatgcctgctgttgtttaccatttgcctcggctgaaaaggcttgtattttcggcgcccttcccgcgaggcactgtaactagttgctttgtctgctgtacgtacgcgtaccatgttgaaataatagcccgccgaaagcgtcgtcgggccacctcgcactcgcgcgcgcctcaaagatgcacaggcagctcagcctctccgccagcccgaagcagcagcagccgcctcctgacggcaccagcaccggcggcggcgacgcggcggcgaaggcgatggcggcggcggaggacgagtcgtcggcctcgcactccagctccaaggccagcagggggtggtcggcgagggacgagagggccatccacctcgtcccgctgctcaccttcctctgcttcctcctgctcttcctctgctcccacgacccgtcccccgccgatatgtcgagcttcgctggaggcggctgcggaggaggaggagcgagatctgggaaccggaggttaaggatgctttagtgtgcgtattacctacccattggagtattattatccgcgatgcggatgttgtacttgtccagcagtaaccaagtatgggaccaaagtatgtcaccatacaaaacactcttgctgtggtaatactaccaacctacatcagcatgttcctgattaccatttgagctggattcgaaatacctggcacgtccaacaggcagcagtacatggcaatggcattccaaaggcgtggtgatcggcccggaagacgtcgcggcggcgcggaatttctcgttaaaaacaacgaagacggcggcgggcggcgagtcctgcccgagatggggggtcacaagaagacctcggccccgccgtcgtggggtcctggctcgactccatgaaggcctcgtcacccaggcacaggctcatggcgcccgtgcccggcgccgccgacgcggagcacgacgac

SEQ ID NO: 1177 - protein, 376 aa, Zea mays
  misc_feature: Ceres CLONE ID no.1580247
  misc_feature: Bit score of 509.3 for HMM based on sequences of FIGURE 9.
  misc_feature (104)..(339): Pfam Name: Trehalose_PPase Pfam Description: Trehalose-phosphatase
  misc_feature: Functional Homolog Of Ceres SEEDLINE ID no. ME20095 at SEQ ID NO. 1129
MTKHGVVIGPEDVAAARHFSFPPPRTAAGGESCRKLAAQVDLGPAVVGSWLDSMKASSPRHRLMAPVPGAADAEHDDWMERHPSALDRFDALAAAAKGKQVAVFLDYDGTLSPIVEDPDRAVMTDEMRDAVRGVAARFPTAIVSGRCRDKVFSFVRLAELYYAGSHGMDIRGPTADANHHHGNGKAEAEAEAVLCQPASEFLPVMQEVYAALVAKVERAIPGAKVEDNKFCLSVHFRCVEEACWAALFEQVRAVLRDHPGLRLTQGRKVLEVRPMIRWDKGKALEFLLHALGFAADADRDDVFPIYVGDDRTDEDAFRVLRARGHGAGILVSRFPKDTSVLHATRPRRGQGVPAQARRRQRRQLMIRPAIRFPFPP

SEQ ID NO: 1178 - DNA, 1510 bp, Glycine max
  misc_feature: Ceres CLONE ID no.644201
  misc_feature: Encodes the peptide sequence at SEQ ID NO 1179
catatcatactctcttctcttctcttcactttgatttcattgcaattacctctttttgttgtgatcttcttcccttctctgttctaaaaaagaacacggctgatctgggctcgactaaaacaaatcactaagtaaaaatgacgcagaatgcgatagtgtccaagacaaaatcggggatcaaccgggacataaccgtgccacaaaagccactggcggcggcggcggcggcgggggggtacattcccattccgaggaggagggttttgaagaacctggaaatcaatgcatgggttgattccatgagatcctcttctccaaccaattccaaatccacctcttctctcgcagaagaacacagcacttggattcttcgccacccctcagcattagacatgttcgagcaaattatggatgcgtcccggggaaagcaaattgtcatgtttctcgactatgatggtactttgtcgcctattgttgatgacccagaccgtgctttcatgtcggattcgatgaggagaacggtgaggaaacttgcaaggtgttttcctactgctatagttaccggcagatgcaaagacaaggtttacaattttgttcgcttggctgagctatattatgctggaagccatggcatggatattcaagggccaacaagaacctccaaatacagcaacaaagataaaggagagcctgttctttttcaacctgctagtgaatttcttcccatgattgatgaggtgtaccatcaattagttgagaaaatgaaatcaattcctggagccatggtggagaacaacaagttctgctgttctgttcattttcgctgcgttgatgaaaagaaatggagtgaactggcacaggaagtgagatcagtattaaaagagtacccgaagcttcgtcttaaccaaggaaggaaggtattagagattcgtccatctattaaatgggacaaagggaaggcgctggaatttttgttagagtcacttggatttgccaactgtaacgatgtctttcctgtttacattggagatgataaaaccgatgaagatgcattcaagaaattaagagacagaggacaaggttttgggattcttgtctcgaaatttccaaaggacactactgcatcatactctttacaagaaccaaacgaggtgatggatttccttcaacgtttggtggagtggaaacaagtatccctccgactcagaacacgttctcgggtgtaaatggatagaatgataatgtacatccctaccctgccataaaaaatggagttcagctagggtagcatataggacccttttttctatgttttgttcagattagaacagagaacaaaaatgtatggaaaaaggaaagacaaaagtgtctttctgagtttgaagcacgtctacatggatgtaattagccacgtagtttttgtagtacaggggaaacgtctctgttgcatcaaatgtaattctgaatggaaaataacatgttacgtatcgaaaaatatatattattgtat

SEQ ID NO: 1179 - protein, 362 aa, Glycine max
  misc_feature: Ceres CLONE ID no.644201
  misc_feature: Bit score of 684.3 for HMM based on sequences of FIGURE 9.
  misc_feature (102)..(337): Pfam Name: Trehalose_PPase Pfam Description: Trehalose-phosphatase
  misc_feature: Functional Homolog Of Ceres SEEDLINE ID no. ME20095 at SEQ ID NO. 1129
MTQNAIVSKTKSGINRDITVPQKPLAAAAAAGGYIPIPRRRVLKNLEINAWVDSMRSSSPTNSKSTSSLAEEHSTWILRHPSALDMFEQIMDASRGKQIVMFLDYDGTLSPIVDDPDRAFMSDSMRRTVRKLARCFPTAIVTGRCKDKVYNFVRLAELYYAGSHGMDIQGPTRTSKYSNKDKGEPVLFQPASEFLPMIDEVYHQLVEKMKSIPGAMVENNKFCCSVHFRCVDEKKWSELAQEVRSVLKEYPKLRLNQGRKVLEIRPSIKWDKGKALEFLLESLGFANCNDVFPVYIGDDKTDEDAFKKLRDRGQGFGILVSKFPKDTTASYSLQEPNEVMDFLQRLVEWKQVSLRLRTRSRV

SEQ ID NO: 1180 - DNA, 1579 bp, Glycine max
  misc_feature: Ceres CLONE ID no.538689
  misc_feature: Encodes the peptide sequence at SEQ ID NO 1181
tcacacatacaatacaacacaatacactctccatttctcactccttttcttctcttcactcttcatttcctctcattaatctctttctttgatccatattctgccataacagcacacgataactaaaccacaacaacacttgaagttagttacttgtactttctctgaaactttgattgtgtcaaaatgacgcagcagaatgtggtagtgtctgatactaaatcaggagtttccttaacggttttctcaacaacacaaaagccaccggcggcgccaggagggtacatttccattccaaggaggagggttttgaagaaccttgaaatcaatggaggccaaagaatcaatgcatgggttgagtccatgagagcctcctctccaacccatcataaatccacaccttctttgtctcaggagcataactcttggattcttcaccatccatcagcattagacatgtttgaccaaatcattgacgcgtcaaagggaaaacaaattgtcatgtttctggactatgatggcacgctgtctcctatagttgacgaccctgaccgtgctttcatgtctgattcgatgagaaaaacagtgaggaaacttgctaggtgtttccctactgctatagtgaccggcagatgcaaagacaaggtgtacaattttgttcgcttggcagagctatattatgcaggaagccatggcatggatattaaaggaccaacaagaagctccaaatacaacaaagatagcaaagctgaggcaatcctttgtcaacctgccagtgattttcttcccatgatagatgaggtgtatcaacaattagttgaaaagacaaaatcaactcctggagctctggttgagaacaacaagttctgtctttctgttcattttcgttgtgttgatgaaaagaaatggagtgaactggcacgccaagtgaaatcagttttaaaggagtacccgaaacttcgacttacccaaggaagaaaggtgctagagattcgtcccactattaaatgggacaaagggaaagccttggaatttttattagagtcacttggtttggccaactgtagtgatgtctttcctgtttatattggcgatgatcgatccgatgaagatgctttcaagaaattaagagacaaaggacaaggttttggcattcttgtctccaaatttccgaaagacacaagcgcatcttactctttgcaagaacccaatgaggtgatgaactttcttcaacgcttggtggagtggaaacatgtgtccctgcgagcacgttcctgagtgtaaatgagaaagatgaaatgacatgtacatccctaccctgccatgaaaaagaagttcagcttgggtagaatataggatgttttgtattttttgttcagtcagaacaaaagtgtatggaaatagaaagacaaaagtgtctttcttagtttgaaagacgtccacattcatgtaattagccaagtattactcagtacatgggaaaaaagtttatgtagccttcagatgcaagtctgaatggattaaaatttcgcttccttgttacatggatcaaactatgattaagtaagtatggtttctc

SEQ ID NO: 1181 - protein, 363 aa, Glycine max
  misc_feature: Ceres CLONE ID no.538689
  misc_feature: Bit score of 682.8 for HMM based on sequences of FIGURE 9.
  misc_feature (107)..(342): Pfam Name: Trehalose_PPase Pfam Description: Trehalose-phosphatase
  misc_feature: Functional Homolog Of Ceres SEEDLINE ID no. ME20095 at SEQ ID NO. 1129
MTQQNVVVSDTKSGVSLTVFSTTQKPPAAPGGYISIPRRRVLKNLEINGGQRINAWVESMRASSPTHHKSTPSLSQEHNSWILHHPSALDMFDQIIDASKGKQIVMFLDYDGTLSPIVDDPDRAFMSDSMRKTVRKLARCFPTAIVTGRCKDKVYNFVRLAELYYAGSHGMDIKGPTRSSKYNKDSKAEAILCQPASDFLPMIDEVYQQLVEKTKSTPGALVENNKFCLSVHFRCVDEKKWSELARQVKSVLKEYPKLRLTQGRKVLEIRPTIKWDKGKALEFLLESLGLANCSDVFPVYIGDDRSDEDAFKKLRDKGQGFGILVSKFPKDTSASYSLQEPNEVMNFLQRLVEWKHVSLRARS

SEQ ID NO: 1182 - protein, 384 aa, Nicotiana tabacum
  misc_feature: Public GI ID no.51458330
  misc_feature: Bit score of 983.6 for HMM based on sequences of FIGURE 9.
  misc_feature (122)..(364): Pfam Name: Trehalose_PPase Pfam Description: Trehalose-phosphatase
  misc_feature: Functional Homolog Of Ceres SEEDLINE ID no. ME20095 at SEQ ID NO. 1129
MDLKSNTSPVVTDPAPMTQSRLGTHSALMPYSPTGATFSPTLFLTIPRKKPGILDDVRSNTWLDAMKSSSPTHSKKNKDSNAELTANESDLAYRIWMLKYPSALSSFEQITNYAKGKRIALFLDYDGTLSPIVDDPDRAFMSGAMRATVRNVAKYFPTAIISGRSRDKVYDFVGLAELYYAGSHGMDIMGPVRSVSDDYSCIRSTNKQGKEVNLFQPAGEFLPMIDEVFRSLIELTKDITGAKVENNKFCVSVHYRNVDEKSWSAIGESVDELLKHYPRLRLTHGRKVLEVRPVLNWDKGKAVEFLLESLGLKNCDDVLPIYVGDDRTDEDAFKVLREGNKGYGILVSSAPKESSAFYSLRDPSEVMEFLKCLVSWKKSSGFSY

SEQ ID NO: 1183 - DNA, 376 bp, Triticum aestivum
  misc_feature: Ceres CLONE ID no.817225
  misc_feature: Encodes the peptide sequence at SEQ ID NO 1184
aacaccaatcatttcctcttcactgtctcttctccttttctgccttccaaccaaagccccatcccttgattcgatcgatcgggatcctcctctcgcgcgcttctaggacctgcccctcgaagcttctccttctccttggacccgtgcttggtatggcgcagacgactgtggtggtgccggaggtgggcatgacggctgccacgcccactgcgtgcccctsccctgggtcgctgttcccgtacccgccgccgcgtgccgggatggccgtgagccgcaagtgcctgcgggcgscgcagscggagcttggcgcggggatgctcagtggcctggtcgagtccatgcgggcgtcctcccccacgcacgccagggccgccgc

SEQ ID NO: 1184 - protein, 373 aa, Triticum aestivum
  misc_feature: Ceres CLONE ID no.817225
  misc_feature: Bit score of 646.3 for HMM based on sequences of FIGURE 9.
  misc_feature (114)..(345): Pfam Name: Trehalose_PPase Pfam Description: Trehalose-phosphatase
  misc_feature: Functional Homolog Of Ceres SEEDLINE ID no. ME20095 at SEQ ID NO. 1129
MAQTTVVVPEVGMTAAAPTACSCPGSLFPYPPPRAGMAVSRKCLRAAQAELGAGMLSGLVESMRASSPTHARAAAALSAGVDDEHAAWMARHPSALGKFEEIVAASKGKQIVMFLDYDGTLSPIVDDPDAAFMSETMRMAVRSVAKHFPTAIVSGRCRDKVFDFVKLAELYYAGSHGMDIKGPAKSSKSKAKGVLFQPASEFLPMIEEVHQRLIEETKHVAGAKVENNKFCVSVHFRCVDEKSWGALAETVKGVMREYPKLRMSQGRMVFEVRPTIKWDKGKALEFLLESLGFADCPNVLPVYIGDDRTDEDAFKVLRRRGQGVGILVSKHPKDTSASFSLQEPAEVMEFLLRLVEWKQLSKARLRLRRQADA

SEQ ID NO: 1185 - DNA, 1917 bp, Triticum aestivum
  misc_feature: Ceres CLONE ID no.923842
  misc_feature: Encodes the peptide sequence at SEQ ID NO 1186
accttaagctctgagaagctaccacacacacacacacacgcaccgcgcacgaacgcacgcgcgcaccccctgaaggccagctgcttgtgcccgtgcgccgtctcgccggagcttggcgttggaacgagaccgggagcttgcgggcttcgcgtacgttacacgagctctcagctggttctccggccgggcttgcttgtttggccgtgcgcagcgcgccgagtgacatgacgacgagccaggacgtggttgtttcggagatgggcattgggccgggtggggcggccatgccgggctccggcgccgcgggcctcttcgcgtgccgcagcgccgccagcgccggagccatgtccatggggcagacgtaccgcgacctcgccgccgccgcctcgcgctccgcgaactgcacatgggccgagctcgaggccatgcgcgccgcctcgcccacccgctcccgccccggcaccgacgtcgacgagctcacggcctggatgaggaagcacccgtcggcgctaggcaagttcgatcaaatcgccagcgcgtccaaggggaagaagatcgtcatgttcctggactacgacggcaccctctcgcccatcgtcgccaaccccgacgccgcctacatgagcgacgcgatgagggaggcggtgcgcgacgttgccaagcacttcccgacggcgatcgtgagcgggcggtgccgcgacaaggtgcacaacttcgtcggcctctccgagctgtactacgccggcagccacggcgtggacatcaaggggccaggctccaatccggagtctgtgctgtgccaacctgcaagcgagttcctccccatgatcgatgaggtgtacaaggtgcttgtggaaaagacgaagtccacacctggagccaaggtggagaacaacaagttctgcctgtccgtccacttcagatgtgtggatgaaaagagatggaacttcttggctgagcaggtcaaggccgtgatcaaggactaccccatgctgaagctcacccaagggaggaaggtcttcgagctccggcccagcattatgtgggacaagggcaaggcgctggagttcttgcttgaatcgctaggattcgccagctgcagcgacgtcctgccggtgtacatcggcgacgaccgcaccgacgaggacgccttcaaggtgctgaggaagaggggccagggcgtggggatcctggtgtccaagtgcgccaaggagaccagcgcgtcctactcgctgcaggacccggcggaggtcatggagttcctgctccggctggtggactggaagcggaggtcgtcggcgccgcccatggtccggccgcgggtgtaaccccggccggcccaccagctatagcctagcacagatccaagacgccggtcgggtcgaccaccggtcaatccagctcgtcgcgatcggtgtcccgtcatgccaacactaccccacccccaccccaccccaccccgcccaagttttctctgatggttctctggtggcctccggagcagaccctgcggtggttacgtgcatgttcttcggtcgagcccccgtggaaaacgatcggaggcccacgcagctcgctcgctcgcttgctcccgaactgcacgccttgtgctgggggctgcagcagctacaatataacacagtgaccgaccgaccgtgtctacctaggcactactgctggtctactagtactctactgtactcccttgttgttttttgtcccacgggctcggaaggcacatgcaaagctacctgccgttcccagacccggccggccttgacgagaaagaaggttctccgtgttattcacccatgtaactagctaggatcgccctctgtccagcgttcaattgtcatctctgtaaaatgcagtaatggaatcagttaacagtgattatttccaaaaaaaaaaaaaaaa

SEQ ID NO: 1186 - protein, 367 aa, Triticum aestivum
  misc_feature: Ceres CLONE ID no.923842
  misc_feature: Bit score of 608.7 for HMM based on sequences of FIGURE 9.
  misc_feature (114)..(341): Pfam Name: Trehalose_PPase Pfam Description: Trehalose-phosphatase
  misc_feature: Functional Homolog Of Ceres SEEDLINE ID no. ME20095 at SEQ ID NO. 1129
MTTSQDVVVSEMGIGPGGAAMPGSGAAGLFACRSAASAGAMSMGQTYRDLAAAASRSANCTWAELEAMRAASPTRSRPGTDVDELTAWMRKHPSALGKFDQIASASKGKKIVMFLDYDGTLSPIVANPDAAYMSDAMREAVRDVAKHFPTAIVSGRCRDKVHNFVGLSELYYAGSHGVDIKGPGSNPESVLCQPASEFLPMIDEVYKVLVEKTKSTPGAKVENNKFCLSVHFRCVDEKRWNFLAEQVKAVIKDYPMLKLTQGRKVFELRPSIMWDKGKALEFLLESLGFASCSDVLPVYIGDDRTDEDAFKVLRKRGQGVGILVSKCAKETSASYSLQDPAEVMEFLLRLVDWKRRSSAPPMVRPRV

SEQ ID NO: 1187 - DNA, 1462 bp, Triticum aestivum
  misc_feature: Ceres CLONE ID no.941845
  misc_feature: Encodes the peptide sequence at SEQ ID NO 915
caggaaaaaaccggtctggtcccctcgtcctcggtgaactattccccactgtcactactgggcaccactctcacgcagcgggaggcgcgtgtcgtgagcacacgtgtggttgtttgcgtgcgccatggcgaaccaggacgtggtgctccgcccggacatgggcggcatagcttcggccgcggccatgccgggctcctccagccgcccgatcttcgcgtgccgcggcgccgcgtcgacctccctgcggcgccgctccggcgtcgacgacgactacggcgcccggtcaccctgcgccacaagctgggtcgtccaggccatgcgggcgtcttcgccggctcgctccgcagctgtcgacgagtacgccgcgtggacgaggaagcacccgtcggctctggctagcttcgagcagatcgcggcctccgccaaggggaagcaggtggtcgtgttcctggactacgacggcacgctctcgcccatcgtcgccgaccccgacacggcgttcatcaccggcgagatgcgggaggcggtgcgcggcgttgcgaagcacttcccggcggcgatcgtcaccggccggtgcgtggagaaggtgtgcagcttcgtaggcctctcggagctctactacgcgggcagccacggcatggacatcaagggcccaggctccaacgcggaggaggtcctcctgcaacctgctcgcgagttcctcccggtcatcgccgaggtctacgaggctctggtggagaagaccaagagcacgccgggggccagggtggagaacaagttctgcctctccgtgcacttccggtgcgtagatgaaaagagatggagtccattggccgagcaagtcaaggaggtgctccgggactaccccgatctcaggctcaacgaaggcagaaaggtcctggagatccggccgtccatcatgtgggacaagggcaaggccgtggagttcttgctccaatctctgggattcgacggacgcagcgacgtcctgccgctgtacctcggggacgaccgcactgacgaggatgctttcaagatgctgagaaagagaggtcatggcctcggcatccttgtctccaagtgccctagggagaccgacgcctcctactctcttcaggaccccactgaggttatggagttccttcaccgcttggtgcagtggaagcgccggcgatcatcatcgtcatcgtcagcgatgcgcgcaagagtgtagcgcagtcacagactgccacatcagcggctgctgctggcactgatttatcaagaagcttcagcatgtttaattaagtactccctccgtaaactaatataagagcatttagaatactaaagtagtgatctaaacgctcttatattagtttacaaagggagtagtttgttagctaatttggttgtacttattccatgcatgtaataaccatcgcctatgtctagttcccgcttttgaaaaaaaaaaaaaaaa

SEQ ID NO: 1188 - protein, 208 aa, Gossypium hirsutum
  misc_feature: Ceres Clone ID no. 100021678
  misc_feature (1)..(208): Bit score of 103.8 for hmm based on sequences of FIGURE 13.
  misc_feature (127)..(208): Pfam Name: Synaptobrevin Pfam Description: Synaptobrevin
  misc_feature: Functional Homolog Of SEQ ID NO. 160
MSLEPFIYSFVARGTMILAEYTEFTGNFPAIATQCLQKLPSSNNKFTYNCDHHTFNFLVEDGYAYCVVAKDSVGKQISIAFLERIKADFKKRYGGGKADTAIAKSLNKEFGPVMKEHMKYIIEHAEEIEKLLKVKAQVSEVKSIMLENIDKAIDRGENLTTLADRTENLRDQAQAYRNQGTKIRRKMWYQNMKIKLVVLGILVLLILV

SEQ ID NO: 1189 - protein, 129 aa, Panicum virgatum
  misc_feature: Ceres CLONE ID no.1821214
  misc_feature: Bit score of 100.1 for HMM based on sequences of FIGURE 15.
  misc_feature (19)..(43): Pfam Name: zf-A20 Pfam Description: A20-like zinc finger
  misc_feature (111)..(121): Pfam Name: zf-AN1 Pfam Description: AN1-like zinc finger
  misc_feature: Functional Homolog Of Ceres SEEDLINE ID no. ME02401 at SEQ ID NO. 749
  misc_feature (24)..(24): Xaa is any aa, unknown, or other
  misc_feature (78)..(78): Xaa is any aa, unknown, or other
MAQRDKKVEEPTELHAPELTLCAXSCGFPGNPATNNLCQNCFVAASASVSPFFPSSSSSAPSPAVFDKPRPAVAPTAXWPPFPAAADRPPAGPAESLSEAPRTSPSVTRGHSCRKPVGLTGSRGRCREL

SEQ ID NO: 1190 - DNA, 476 bp, Brassica napus
  misc_feature: Ceres CLONE ID no.1040399
  misc_feature: Encodes the peptide sequence at SEQ ID NO. 1191
  misc_feature (471)..(471): n is a, c, t, g, unknown, or other
acattccattcatttcctctctctctctctctctctcctctgattctctctatacgacccgtgagctcgccggaggagggtgaaaccaataaagatggcgcagaggacggagaaggaagagacggagttcaaggtcctcgaatccctgacgacccccgccaccgccacgaccacgctctgctcaaataactgcggcgtyacagcgaatccagccaccaacaacatgtgtcagaaatgtttcaacgcttccatcgccgccgccggcgtagactccggttcgacgttgaagagagcgtcgagatccgtcaatcttaggcccacgccagccaaagtcgtgatccgtcccagggagatcgatccggttaagagagatcagcagacggtaaaccggtgttccggttgtcggaagaaggtcgggctgaccgggttcagatgccgatgcggtaaccttttctgctccgagcaccgttnctccg

SEQ ID NO: 1191 - protein, 127 aa, Brassica napus
  misc_feature: Ceres CLONE ID no.1040399
  misc_feature: Bit score of 156.5 for HMM based on sequences of FIGURE 15.
  misc_feature (100)..(125): Pfam Name: zf-AN1 Pfam Description: AN1-like Zinc finger
  misc_feature (26)..(50): Pfam Name: zf-A20 Pfam Description: A20-like zinc finger
  misc_feature: Functional Homolog Of Ceres SEEDLINE ID no. ME02401 at SEQ ID NO. 749
  misc_feature (35)..(35): Xaa is any aa, unknown, or other
  misc_feature (126)..(126): Xaa is any aa, unknown, or other
MAQRTEKEETEFKVLESLTTPATATTTLCSNNCGXTANPATNNMCQKCFNASIAAAGVDSGSTLKRASRSVNLRPTPAKVVIRPREIDPVKRDQQTVNRCSGCRKKVGLTGFRCRCGNLFCSEHRXS

SEQ ID NO: 1192 - DNA, 437 bp, Brassica napus
  misc_feature: Ceres CLONE ID no.1093691
  misc_feature: Encodes the peptide sequence at SEQ ID NO. 1193
atatttcccattcatttcctctctcttctctctcaacaccattcgcaagctcgccggagaaaatcaacaacgcagatggcgcagagaacagagaaggaagagacggagttcaaggtcctcgaaaccttgacgacgacaacaaccccgacgctctgctccaacaactgcggcgtcacagcgagtccatcaaccaacaacatgtgccagaaatgtttcaacgccggtatagatccaactccgatcgcaaaaagatcagccagatccgtcagtctccggtcaacgccagccaaagctgcgatccgtcccagggagaccgatccggtcaagagagaccaccatcaacagaccgtaaaccgatgctccggttgtcggaagaaagtcgggttgaccggattcagatgccgatgcggcgatcttttctgcgcggagcacgctac

SEQ ID NO: 1193 - protein, 120 aa, Brassica napus
  misc_feature: Ceres CLONE ID no.1093691
  misc_feature: Bit score of 124.4 for HMM based on sequences of FIGURE 15.
  misc_feature (24)..(48): Pfam Name: zf-A20 Pfam Description: A20-like zinc finger
  misc_feature (95)..(119): Pfam Name: zf-AN1 Pfam Description: AN1-like Zinc finger
  misc_feature: Functional Homolog Of Ceres SEEDLINE ID no. ME02401 at SEQ ID NO. 749
MAQRTEKEETEFKVLETLTTTTTPTLCSNNCGVTASPSTNNMCQKCFNAGIDPTPIAKRSARSVSLRSTPAKAAIRPRETDPVKRDHHQQTVNRCSGCRKKVGLTGFRCRCGDLFCAEHA

SEQ ID NO: 1194 - DNA, 857 bp, Gossypium hirsutum
  misc_feature: Ceres CLONE ID no.1847516
  misc_feature: Encodes the peptide sequence at SEQ ID NO. 1195
atacgcgtctctatgaggcccatattccgtcgccattactgaccgacctttctcgaccccttcaaatcccctctctctctctctctccttaattccaacgccaacgccccctaattttctctccaaccaaacactcattctctccttcctctctatcctccccttcaaatttgttgttttccttttcctccttcgaaatcagctcaaggagatatggctcaaagaaccgaaaaagaagagactgaattcaaagtccctgaaaccctgacgctatgcgttaacaactgcggggttacgggtaatccagccaccaacaacatgtgccagaagtgttttagtgccaccacggccgcaacatcctcctcttcctcttcctcttccaccaacaacaccgctacttccgctaccgacgataaatcctcgagatctacgccgactcgttcacaggacaatcgatccgattccgctccacctacaacagctgcaacaacggcaacagcaacgacgaatagtccgatgaccgcttcaaatcggtctggatacgataccgcggaaaagaagtcggtgaatcgatgttctggttgcagaaaacgcgttgggttgaccgggttccggtgtcgatgcggggagcttttctgttcggaccatcggtactcggatcgacacgattgtagctacgactacaaggcggcgggtcgcgaagccatcgctagagaaaatcccgtggttaaagcagccaagattatcagagtttgagtttttaccaaatggatccaaattaaattaaataaactattcaaaacatttttcgacctgaaaatagcaagttgtggagatctatgctcgatctcaaatgg

SEQ ID NO: 1195 - protein, 180 aa, Gossypium hirsutum
  misc_feature: Ceres CLONE ID no.1847516
  misc_feature: Bit score of 365.1 for HMM based on sequences of FIGURE 15.
  misc_feature (121)..(161): Pfam Name: zf-AN1 Pfam Description: AN1-like Zinc finger
  misc_feature (18)..(42): Pfam Name: zf-A20 Pfam Description: A20-like zinc finger
  misc_feature: Functional Homolog Of Ceres SEEDLINE ID no. ME02401 at SEQ ID NO. 749
MAQRTEKEETEFKVPETLTLCVNNCGVTGNPATNNMCQKCFSATTAATSSSSSSSSTNNTATSATDDKSSRSTPTRSQDNRSDSAPPTTAATTATATTNSPMTASNRSGYDTAEKKSVNRCSGCRKRVGLTGFRCRCGELFCSDHRYSDRHDCSYDYKAAGREAIARENPVVKAAKIIRV

SEQ ID NO: 1196 - DNA, 444 bp, Brassica napus
  misc_feature: Ceres CLONE ID no.974539
  misc_feature: Encodes the peptide sequence at SEQ ID NO. 1197
ctctctctctcctctcctctcctctcctctcctctcctctctcaatacgatttgtaagctcgccggagtaaatcaacaacacagatggcgcagagaactgaaaaggaagagacagagttcaaggccctcgaaaccttgacgacgacaacaaccccgacgctctgctccaacaactgcggcgtcacagcgtgtccatcaaccaacaacatgtgccagaaatgtttcaacgccgccgccgccggtatagatccaaatccgatcgtaaaaagatcagccagatccgtcagtctccggtcaacgccagccaaagccgcgatccgtcccagggagaccgatccggtcaagagagaccatcatcaacagaccgtaaaccgatgctccggttgtcggaagaatgtcgggttgaccggattcagatgccgatgcggcgaccttttctgcgcg

SEQ ID NO: 1197 - protein, 120 aa, Brassica napus
  misc_feature: Ceres CLONE ID no.974539
  misc_feature: Bit score of 114.8 for HMM based on sequences of FIGURE 15.
  misc_feature (98)..(120): Pfam Name: zf-AN1 Pfam Description: AN1-like Zinc finger
  misc_feature (24)..(48): Pfam Name: zf-A20 Pfam Description: A20-like Zinc finger
  misc_feature: Functional Homolog Of Ceres SEEDLINE ID no. ME02401 at SEQ ID NO. 749
MAQRTEKEETEFKALETLTTTTTPTLCSNNCGVTACPSTNNMCQKCFNAAAAGIDPNPIVKRSARSVSLRSTPAKAAIRPRETDPVKRDHHQQTVNRCSGCRKNVGLTGFRCRCGDLFCA

SEQ ID NO: 1198 - DNA, 949 bp, Gossypium hirsutum
  misc_feature: Ceres CLONE ID no.1832340
  misc_feature: Encodes the peptide sequence at SEQ ID NO. 1199
aacgccccctaattttctctccaaccaaacactcattctctccttcctctctatcctccccttcaaatttgttgttttccttttcctccttcgaaatcagctcaaggagatatggctcaaagaaccgaaaaagaagagactgaattcaaagtccctgaaaccctgacgctatgcgttaacaactgcggggttacgggtaatccagccaccaacaacaccgctacttccgctaccgacgataaatcctcgagatctacgccgactcgttcacaggacaatcgatccgattccgctccacctacaacagctgcaacaacggcaacagcaacaacgaatagtccgatgaccgcttcaaatcggtctggatacgataccgcggaaaagaagtcggtgaatcgatgttctggttgcagaaaacgcgttgggttgaccgggttccggtgtcgatgcggggagcttttctgttcggaccatcggtactcggatcgacacgattgtagctacgactacaaggcggcgggtcgcgaagccatcgctagagaaaatcccgtggttaaagcagccaagattatcagagtttgagtttttaccaaatggatccaaattaaattaaataaactattcaaaacatttttcgacctgaaaatagcaagttgtggagatctatgctcgatctcaaaaggaaaaaaaaagtaaaaaaagactgtttcagagagggagaaatgagtcggtcgaaatcttgattacaaaaattcctggagatgaacaagatattctctcctctgattcttctggttggatcaaatctatagtattttcagtttactttttattattaatttagaaatgaaagattatcgagatttattagttgcagttgatatgtgttacggttactagaccccttccatgatcgagatcttatatatcgaggctttggtttagattg

SEQ ID NO: 1199 - protein, 156 aa, Gossypium hirsutum
  misc_feature: Ceres CLONE ID no.1832340
  misc_feature: Bit score of 305.5 for HMM based on sequences of FIGURE 15.
  misc_feature (97)..(137): Pfam Name: zf-AN1 Pfam Description: AN1-like Zinc finger
  misc_feature (18)..(34): Pfam Name: zf-A20 Pfam Description: A20-like Zinc finger
  misc_feature: Functional Homolog Of Ceres SEEDLINE ID no. ME02401 at SEQ ID NO. 749
MAQRTEKEETEFKVPETLTLCVNNCGVTGNPATNNTATSATDDKSSRSTPTRSQDNRSDSAPPTTAATTATATTNSPMTASNRSGYDTAEKKSVNRCSGCRKRVGLTGFRCRCGELFCSDHRYSDRHDCSYDYKAAGREAIARENPVVKAAKIIRV

SEQ ID NO: 1200 - DNA, 1133 bp, Panicum virgatum
  misc_feature: Ceres CLONE ID no.1961986
  misc_feature: Encodes the peptide sequence at SEQ ID NO. 1201
ttgcctttgcccgctgcgcttgcgcgtccgcggaaggggacgacgacgcgtccccgtctcctccccttccccgataaaaaggccgggcgcctctcgttcattcctcgctcatcgccgatcacaaccgcgccctccccccaatccccgattcgcgagctcgtccgcgcctcccggcctctcctccccacccccacccgccgcccctccgagaagcgaagcgaagctccgggccgcgccaccgcgcaggcaggcacccaaggcagcaggcgcgggttccttccgccaggtgcgcgggtaggcggcggcatggcgcagcgcgacaagaaggaggagcccacggagctccgggcgccggagatcacgctctgcgccaacaactgcggcttcccggggaacccggccacgcagaacctctgccagagctgcttctcggcggccacggcgtcgatgtcgtcgtcgccgacgtcctcctcgtcgtcctccacggccccggcgccggccgcgccgccccagccgaggccggcgccggcggagctggcctcccccgccgacgcggccgtggcggccccggctccggaggccgcgaaggcgccggcgaggacgtcggcgaaccggtgctcgagctgccggaagcgggtggggctgacggggttccggtgccggtgcggcgagctgttctgcggcgcgcaccggtactcggaccggcacggctgcagctacgactacaagggcgccgccagggacgccatcgcccgggagaacccggtggtgcgcgccgccaagatcgttaggttctgatcgacgacggagtcaaaattcctccatccatccacaggatcaagcaagcgaggaagacaaagaggaagcacacatccacggaaatggaaggccttttcccttggtgttactatgctgttcttcgaagcgtttgattttcaatctcctttttctttttacgatttctcaaatggaagaaaaaatgggaggaaaagaggtggacaaggaatagtgtaataataatgggggcaatgaggccgcggcggtggttgagagcaaaaggatcaacgcaatggattgggtgtatgtacctgtcacacgcaagctttgtgcaaaaactattatacatttctatc

SEQ ID NO: 1201 - protein, 163 aa, Panicum virgatum
  misc_feature: Ceres CLONE ID no.1961986
  misc_feature: Bit score of 357.8 for HMM based on sequences of FIGURE 15.
  misc_feature (104)..(144): Pfam Name: zf-AN1 Pfam Description: AN1-like Zinc finger
  misc_feature (18)..(42): Pfam Name: zf-A20 Pfam Description: A20-like zinc finger
  misc_feature: Functional Homolog Of Ceres SEEDLINE ID no. ME02401 at SEQ ID NO. 749
MAQRDKKEEPTELRAPEITLCANNCGFPGNPATQNLCQSCFSAATASMSSSPTSSSSSSTAPAPAAPPQPRPAPAELASPADAAVAAPAPEAAKAPARTSANRCSSCRKRVGLTGFRCRCGELFCGAHRYSDRHGCSYDYKGAARDAIARENPVVRAAKIVRF

SEQ ID NO: 1202 - DNA, 699 bp, Gossypium hirsutum
  misc_feature: Ceres CLONE ID no.1933211
  misc_feature: Encodes the peptide sequence at SEQ ID NO. 1203
gaaaaaaaaaaaaaaaaaaaaaaaaaaaaaaaaaaaaaaaaaaaaaaaaaaaaaaaaaaaaacgccccctaattttctctccaaccaaacactaattctctccttcctctccatcctccccttcaaatttgttgttttccttttcctccttcaaaatcacctcaaggaaatatggctcaaaaaaccaaaaaaaaaaaaactgaattcaaagtacctgaaaccctgactctatgcgttaacaactggggggttacgggaaatccacccaccaacaacatgggccaaaaatgttttagttccaccacggccgccacatcctcctcttcctcttccaccaacaacaccgctacttccgctaccaacaaaaaatcctcaaaatctaccccaactcgttcacaggacaaccgatccaactccgctccgcctacaacagctgcaacaacggcaacagcaacagcaacaacaaatagtccaatgactgcttcaaatcggtctggatacaataccgcgaaaaaaaagtcggtgaatcgatgttctggttgcaaaaaacgcgttgggttgacggggttccggtgtcaatgcggggagcttttctgttcggaccatcggtactcgaatcgacacaattgtagctacaactacaaggcggcgggtcgcgaagccatcgctagggaaaatcccgtggttaaagcacccaaa

SEQ ID NO: 1203 - protein, 176 aa, Gossypium hirsutum
  misc_feature: Ceres CLONE ID no.1933211
  misc_feature: Bit score of 272.5 for HMM based on sequences of FIGURE 15.
  misc_feature (121)..(161): Pfam Name: zf-AN1 Pfam Description: AN1-like Zinc finger
  misc_feature (18)..(42): Pfam Name: zf-A20 Pfam Description: A20-like Zinc finger
  misc_feature: Functional Homolog Of Ceres SEEDLINE ID no. ME02401 at SEQ ID NO. 749
MAQKTKKKKTEFKVPETLTLCVNNWGVTGNPPTNNMGQKCFSSTTAATSSSSSSTNNTATSATNKKSSKSTPTRSQDNRSNSAPPTTAATTATATATTNSPMTASNRSGYNTAKKKSVNRCSGCKKRVGLTGFRCQCGELFCSDHRYSNRHNCSYNYKAAGREAIARENPVVKAPK

SEQ ID NO: 1204 - DNA, 1064 bp, Zea mays
  misc_feature: Ceres CLONE ID no.997558
  misc_feature: Encodes the peptide sequence at SEQ ID NO. 1205
ctcgcccgctcgctccgcgctccctccccccctcccgcgcggatcacagacaggctcacggtcacggccggcctcccaattcgcaacctcgcctccgcctctcctcctacccctccgaaaaagcaagctccggccgggccgccaccaccaccaccgcgcgcgcgtgcacgcgctcccacacacagacagacagacagacagacagagtgagagacgcacggtggttcggggtctcccttctgccaggcgcacgaggagccatggcgcagcgcgacaagaaggaggagcccacggagctccgggcgccggagatcacgctgtgcgccaacaactgcgggttcccgggtaacccggccacgcagaacctgtgccagagctgcttctcggcgtcgaggtcgccgtcgtcccctacctcctcctcctcttccctggcgtccgcggcgtcgcagccgaggccagcagcgctcgtcgtagacgcggcagcggtggaggcgctggccgctccggcggccgcggccgtgggccaggctacggaagccgcggcgagggcgtccgcgagccggtgctccagctgccggaagcgcgtggggctgacggggttccggtgccgctgcggcgagctcttctgcggcgcgcaccggtactcggaccggcacggctgcagctacgactacaggggcgccgcccgggacgccatcgcccgggagaacccggtggtgcgcgcggccaaggtcgttaggttctgatgacgggaaggaaggaaggacacagcacaaaggctcgcagggcggagaaggggaggaggaaggcgtgcggacaaggtcttcggtgttattattattacgctgttcctttgattttaatctcctttttttttaaaaaaatatttgtcctatgggaatgggattgggagaagaggtggacgaagaatagtggagtaataataatggtggtggtgcagtggcggtggttgagggcccgaaacgatgaacagatgggttggattgggttgggtgtatgtatgtgtcacacgcaactttggacagaactattatactagtact

SEQ ID NO: 1205 - protein, 161 aa, Zea mays
  misc_feature: Ceres CLONE ID no.997558
  misc_feature: Bit score of 316.1 for HMM based on sequences of FIGURE 15.
  misc_feature (102)..(142): Pfam Name: zf-AN1 Pfam Description: AN1-like Zinc finger
  misc_feature (18)..(42): Pfam Name: zf-A20 Pfam Description: A20-like zinc finger
  misc_feature: Functional Homolog Of Ceres SEEDLINE ID no. ME02401 at SEQ ID NO. 749
MAQRDKKEEPTELRAPEITLCANNCGFPGNPATQNLCQSCFSASRSPSSPTSSSSSLASAASQPRPAALVVDAAAVEALAAPAAAAVGQATEAAARASASRCSSCRKRVGLTGFRCRCGELFCGAHRYSDRHGCSYDYRGAARDAIARENPVVRAAKVVRF

SEQ ID NO: 1206 - DNA, 531 bp, Sorghum bicolor
  misc_feature: Ceres ANNOT ID no.6091930
  misc_feature: Encodes the peptide sequence at SEQ ID NO. 1207
atggcgcagcgcgacaagaaggtggaggagccgacggagctgcgggcgccggagctcacgctgtgcgccaacagctgcggcttcccggggaacccggccaccaacaacctctgccaggcctgcttccaggccgccacggcttcctccgcctcagcctccgtctcgccgccgtcgccttcctcctcgttgtctccgtccccggcggtgttcaagttcgacgagcagcagcacgcgaggccgtctgcgacggcggtgttcgccgaccggcctgcggagcaaccgccggcgccggcgtccgccaggccgatccggacgacgtcgacttcgtcgtcgtcgtccgtcaaccggtgccagagctgccggaagcgcgtcgggctgacggggttccggtgccgctgcggggagctcttctgcggcgcgcaccgctactcggaccgccacgactgctgcttcgactacaaggccgtcggcagggacgccatcgccagggagaaccccgtcgtgcgcgccgccaagatcgtcaggttctga

SEQ ID NO: 1207 - protein, 176 aa, Sorghum bicolor
  misc_feature: Ceres ANNOT ID no.6091930
  misc_feature: Bit score of 355.6 for HMM based on sequences of FIGURE 15.
  misc_feature (117)..(157): Pfam Name: zf-AN1 Pfam Description: AN1-like Zinc finger
  misc_feature (19)..(43): Pfam Name: zf-A20 Pfam Description: A20-like zinc finger
  misc_feature: Functional Homolog Of Ceres SEEDLINE ID no. ME02401 at SEQ ID NO. 749
MAQRDKKVEEPTELRAPELTLCANSCGFPGNPATNNLCQACFQAATASSASASVSPPSPSSSLSPSPAVFKFDEQQHARPSATAVFADRPAEQPPAPASARPIRTTSTSSSSSVNRCQSCRKRVGLTGFRCRCGELFCGAHRYSDRHDCCFDYKAVGRDAIARENPVVRAAKIVRF

SEQ ID NO: 1208 - DNA, 798 bp, Sorghum bicolor
  misc_feature: Ceres ANNOT ID no.6041596
  misc_feature: Encodes the peptide sequence at SEQ ID NO. 1209
atggcgcagcgcgacaagaaggaggagcccacggagctccgggcgccggagatcacgctgtgcgccaacaactgcggcttcccggggaacccggccacgcagaacctgtgccagagctgcttctcggcggccacggcgtcgaggtcgtcgtcgccgtcgtcccctacctcctcttcctcagcttcagcggtgtcgcagccgaggccggcggcactcgtagacgcagcagcggtggagctgctggcctctgcggatgccgcagccgtgggccagtctatggaggtcgtcgccgccgctccggcggccacggcggcgaggtcgtctgctgtgaaccggtgctccagctgccggaagcgggtggggctgacggggttccggtgccggtgcggcgagctcttctgcggcgcgcaccggtactcggaccggcacggctgcagctacgactacaagggcgccggcagggacgccatcgcccgggagaacccggtggtggcccaaaacgatgaacaaatgggttgggttgggttgggttgggttgggtgtatgtatctgtcacacgcaactttgtgcaaaaactattatactacgagtacgtttctcgtctctctcgtacagaaaacaccagcacgagcgatgattggtcaatcattcgtcaggcaggctcgtatactagtaatcatctctgccgatcccggaagtattttttacagactttttcagaccgaaagattgagaagcgatcaactcctctttccgcagaagaattatgcccccgtgtgtggcccacctgctccataa

SEQ ID NO: 1209 - protein, 265 aa, Sorghum bicolor
  misc_feature: Ceres ANNOT ID no.6041596
  misc_feature: Bit score of 291.0 for HMM based on sequences of FIGURE 15.
  misc_feature (113)..(153): Pfam Name: zf-AN1 Pfam Description: AN1-like Zinc finger
  misc_feature (18)..(42): Pfam Name: zf-A20 Pfam Description: A20-like zinc finger
  misc_feature: Functional Homolog Of Ceres SEEDLINE ID no. ME02401 at SEQ ID NO. 749
MAQRDKKEEPTELRAPEITLCANNCGFPGNPATQNLCQSCFSAATASRSSSPSSPTSSSSASAVSQPRPAALVDAAAVELLASADAAAVGQSMEVVAAAPAATAARSSAVNRCSSCRKRVGLTGFRCRCGELFCGAHRYSDRHGCSYDYKGAGRDAIARENPVVAQNDEQMGWVGLGWVGCMYLSHATLCKNYYTTSTFLVSLVQKTPARAMIGQSFVRQARILVIISADPGSIFYRLFQTERLRSDQLLFPQKNYAPVCGPPAP

SEQ ID NO: 1210 - protein, 164 aa, Oryza sativa subsp. indica
  misc_feature: Public GI ID no.125564176
  misc_feature: Bit score of 310.1 for HMM based on sequences of FIGURE 15.
  misc_feature (105)..(145): Pfam Name: zf-AN1 Pfam Description: AN1-like Zinc finger
  misc_feature (19)..(43): Pfam Name: zf-AN1 Pfam Description: AN1-like Zinc finger
  misc_feature: Functional Homolog Of Ceres SEEDLINE ID no. ME02401 at SEQ ID NO. 749
MAQGDKKDQEPTELRAPEITLCANSCGFPGNPATQNLCQNCFLAATASTSSPSSLSSPVLDKQPPRPAAPLVEPQAPLPPPVEEMASALATAPAPVAKTSAVNRCSRCRKRVGLTGFRCRCGHLFCGEHRYSDRHGCSYDYKSAARDAIARDNPVVRAAKIVRF

SEQ ID NO: 1211 - DNA, 683 bp, Gossypium hirsutum
  misc_feature: Ceres CLONE ID no.1836064
  misc_feature: Encodes the peptide sequence at SEQ ID NO. 1212
atacgcgtctctatgaggcccatattccgtcgccattactgaccgacctttctcgaccccttcaaatcccctctctctctctctctccttaattccaacgccaacgccccctaattttctctccaaccaaacactaattctctccttcctctccatcctccccttcaaatttgttgttttccttttcctccttcgaaatcacctcaaggagatatggctcaaagaaccgaaaaagaagagactgaattcaaagtacctgaaaccctgactctatgcgttaacaactgcggggttacggggaatccagccaccaacaacatgtgccagaaatgttttagttccaccacggccgccacatcctcctcttcctcttccaccaacaacaccgctacttccgctaccgacgataaatcctcgagatctacgccgactcgttcacaggacaaccgatccgactccgctccgcctacaacagctgcaacaacggcaacagcaacagcaacgacgaatagtccgatgactgcttcaaatcggtctggatacgataccgcggaaaagaagtcggtgaatcgatgttctggttgcagaaaacgcgttgggttgacggggttccggtgtcgatgcggggagcttttctgttcggaccatcggtactcggatcgacacgattgtagctacgacta

SEQ ID NO: 1212 - protein, 156 aa, Gossypium hirsutum
  misc_feature: Ceres CLONE ID no.1836064
  misc_feature: Bit score of 235.9 for HMM based on sequences of FIGURE 15.
  misc_feature (121)..(156): Pfam Name: zf-AN1 Pfam Description: AN1-like Zinc finger
  misc_feature (18)..(42): Pfam Name: zf-A20 Pfam Description: A20-like zinc finger
  misc_feature: Functional Homolog Of Ceres SEEDLINE ID no. ME02401 at SEQ ID NO. 749
MAQRTEKEETEFKVPETLTLCVNNCGVTGNPATNNMCQKCFSSTTAATSSSSSSTNNTATSATDDKSSRSTPTRSQDNRSDSAPPTTAATTATATATTNSPMTASNRSGYDTAEKKSVNRCSGCRKRVGLTGFRCRCGELFCSDHRYSDRHDCSYD

SEQ ID NO: 1213 - DNA, 1100 bp, Panicum virgatum
  misc_feature: Ceres CLONE ID no.1909693
  misc_feature: Encodes the peptide sequence at SEQ ID NO. 1214
cccccccaaacccatttccttcctgcctccacgacccagcccaggcccggcggtgcctctccctctcgtctccggatcggcaagagcccagctgctgccggattcacacgacacctcgtcgtctctctctctctctctctctctctctctctctctctctctctctctctctcggcccatggcgcagcgcgacaagaaggtggaggagccgacggagctgcacgcgccggagctcacgctctgcgccaacagctgcggcttcccgggcaacccggcgaccaagaacctctgccagaactgcttcctggccgcctcggcctccgtgtcgccgccgtcgccctcctcctcctcctcgtcgccctcgccggcggtgttcgacaagccgcggccggcggtcgcccctaccgccgtgtggccgccgttccccgcggccgccgaccggcccccggcgggccccgcggagtccccctccaaggcgccccggacgtcgtcgtcggtcaaccggtgccacagctgccggaagcgggtcgggctgacggggttccggtgccgctgcggcgagctcttctgcggcgcgcaccggtactcggaccgccacgactgcggctacgactacaagggcgttgcccgggacgccatcgcccgggagaaccccgtcgtgcgcgccgccaagatcgtcaggttctgagagctggggagcaccggaggagaccacgcagctcagctccacgccgatcgtcgatccatctcccgcgctccggaatccccctctctgtttttctcttttctttcctttttacaaaagtttaaaaaggtgattagtcgaggtgctatcatcatgctgttcttgagaattccacaaagaagaagaagaagatgatgatgatcaaggaaaaaggaggagcggatcatggcaaatcatgatgaaggaaaaagggaatcgagagcacagtgcgatgataatgttgtagcggtggttgggggtggagataggggtcggtttggtgtgttgtcctactacaaatcacaatcttctattaaatttttcttccatctctctctgtataaactaaattataattggaatctccctattgccc

SEQ ID NO: 1214 - protein, 169 aa, Panicum virgatum
  misc_feature: Ceres CLONE ID no.1909693
  misc_feature: Bit score of 336.3 for HMM based on sequences of FIGURE 15.
  misc_feature (110)..(150): Pfam Name: zf-AN1 Pfam Description: AN1-like Zinc finger
  misc_feature (19)..(43): Pfam Name: zf-A20 Pfam Description: A20-like Zinc finger
  misc_feature: Functional Homolog Of Ceres SEEDLINE ID no. ME02401 at SEQ ID NO. 749
MAQRDKKVEEPTELHAPELTLCANSCGFPGNPATKNLCQNCFLAASASVSPPSPSSSSSSPSPAVFDKPRPAVAPTAVWPPFPAAADRPPAGPAESPSKAPRTSSSVNRCHSCRKRVGLTGFRCRCGELFCGAHRYSDRHDCGYDYKGVARDAIARENPVVRAAKIVRF

SEQ ID NO: 1215 - protein, 137 aa, Phaseolus vulgaris
  misc_feature: Public GI ID no.169363
  misc_feature: Bit score of 195.2 for HMM based on sequences of FIGURE 7.
  misc_feature (78)..(118): Pfam Name: zf-AN1 Pfam Description: AN1-like Zinc finger
  misc_feature (18)..(43): Pfam Name: zf-AN1 Pfam Description: AN1-like Zinc finger
  misc_feature: Functional Homolog Of Ceres SEEDLINE ID no. ME04477 at SEQ ID NO. 742
MAQKAQKNDTDFKVPEPITPCATATAAAATSISEPSRFFDAATPATSSRSPKRSLPLEDAANADRTVASEPKRAVNRCSGCRRRVGLTGFRCRCGDLFCAEHRYTDRHDCSYDYKTVGREAIARENPVVKAAKIVKV

SEQ ID NO: 1216 - protein, 180 aa, Gossypium hirsutum
  misc_feature: Ceres Clone ID no.100041169
  misc_feature: Bit score of 439.2 for HMM based on sequences of FIGURE 15.
  misc_feature (121)..(161): Pfam Name: zf-AN1 Pfam Description: AN1-like Zinc finger
  misc_feature (18)..(42): Pfam Name: zf-A20 Pfam Description: A20-like Zinc finger
  misc_feature: Functional Homolog Of Ceres SEEDLINE ID no. ME02401 at SEQ ID NO. 749
MAQRTEKEETEFKVPETLTLCVNNCGVTGNPATNNMCQKCFSSTTAATSSSSSSTNNTATSATDDKSSRSTPTRSQDNRSDSAPPTTAATTATATATTNSPMTASNRSGYDTAEKKSVNRCSGCRKRVGLTGFRCRCGELFCSDHRYSDRHDCSYDYKAAGREAIARENPVVKAAKIIRV

SEQ ID NO: 1217 - DNA, 824 bp, Panicum virgatum
  misc_feature: Ceres CLONE ID no.1765346
  misc_feature: Encodes the peptide sequence at SEQ ID NO. 1218
gaacggggcggagcgacttcagaagaggtcgacccgcaccccttgcaggttgagaatcccaagctcccacccgcagtccgcagacacgctccgccgcttcgccccaattcccaaccaccaccaccttcacttcacctcgaccgaaccgatggagcagcaagggagcgagaacacgcaggagccgctcccctgcgccaacaactgcggtttcttcggctccccggccacgcgcaacctctgctccaagtgcttccgcgacagcctccgccacgccgaggcccaggcggtggcggcgacagcgacagcgacggccgcgctcgccgcctcttcttctccggccgcggcgtcagcggatcccgacgcggcgacagcggcagcgacggaggaggcggggaaggcgcgagcgaaggggaagaagagcggccggtgcgcggcgtgcgggaggaaggtggggctgatggggttcgagtgccggtgcggcggcgtcttctgcggcgcgcaccgctactcggaccggcacgactgcggctacgactacaggggcgccggccgcgacgccatcgcccgcgccaaccccgtcgtcagggccgacaagcaggtcgacaagctctgaccgagcagcgccggcgcgtgctctgctctcaggcagcaaaccatcactggcctggcctggctgctcgatcgaagattcgaagtatgcagtatgcttgattgaagtctagtcgattgcaattcgcgtcaacatctctgtacctcttcgctagttcatgatgtatatttgctatacctacctgctgctagtgcagttgcttgttaacagacag

SEQ ID NO: 1218 - protein, 154 aa, Panicum virgatum
  misc_feature: Ceres CLONE ID no.1765346
  misc_feature: Bit score of 168.4 for HMM based on sequences of FIGURE 15.
  misc_feature (12)..(36): Pfam Name: zf-A20 Pfam Description: A20-like zinc finger
  misc_feature (94)..(134): Pfam Name: zf-AN1 Pfam Description: AN1-like Zinc finger
  misc_feature: Functional Homolog Of Ceres SEEDLINE ID no. ME02401 at SEQ ID NO. 749
MEQQGSENTQEPLPCANNCGFFGSPATRNLCSKCFRDSLRHAEAQAVAATATATAALAASSSPAAASADPDAATAAATEEAGKARAKGKKSGRCAACGRKVGLMGFECRCGGVFCGAHRYSDRHDCGYDYRGAGRDAIARANPVVRADKQVDKL

SEQ ID NO: 1219 - protein, 213 aa, Oryza sativa subsp. indica
  misc_feature: Public GI ID no.125546008
  misc_feature: Bit score of 190.7 for HMM based on sequences of FIGURE 15.
  misc_feature (154)..(194): Pfam Name: zf-AN1 Pfam Description: AN1-like Zinc finger
  misc_feature (74)..(98): Pfam Name: zf-A20 Pfam Description: A20-like zinc finger
  misc_feature: Functional Homolog Of Ceres SEEDLINE ID no. ME02401 at SEQ ID NO. 749
MGGIPFENGSSPIRQGSSSQLLLPLGDQMQWSFISTILCDLEPYWQVQLVFLTMAQESWKKEAEETGVHTPEAPILCVNNCGFFGSRMTENMCSKCYRDTVKAKTVATVVEKKPLASLSSTPLVAEVTDGGSGSVADGKQVMEEDTPKPPSNRCLSCRKKVGLTGFKCRCGGTFCSMHRYADSHKCTFDYKQAGREQIAKQNPLVKADKITKI

SEQ ID NO: 1220 - DNA, 915 bp, Panicum virgatum
  misc_feature: Ceres CLONE ID no.1950900
  misc_feature: Encodes the peptide sequence at SEQ ID NO. 1221
ctcccgacgctcgacccgaaaaaaaatattctccgcggggggtaagggaaaggtcgcgtggcgtctcgcccacagtccatcggtagcaatggcacaagagagctggaaacaagagtccgaggagactagagtccacgcgcctgaggcccctattctctgcataaacaactgtggtttctttggcagcagcatgacgaacaatatgtgctcgaagtgctatagggacttcatcaagttgatggaagctcctgtggtggagaagaaggtgaccacatcagcatcttcttccacagcaccactggagacaaagcgagatgatgcgcctgccgctgctgccactgaagctgtggctgagaagcaagcagagcaagagcccccaaagccacccagcaaccggtgtctgacttgccgcaagaaggtcgggctgaccggcttcctctgccgttgcgggggcaccttctgctccacgcaccgctacaccgactcccaccagtgcacctttgactataagaaggtggcacgggagcagatagccaagcagaatccagttgtgatggccgagaagataaacaagatctaatgaatggttgtgaagggattcatgcctgggttcctgagtcctcaagttcactataatcgataggttccttcgggtggtggtctgggttagcgtggtagtagggggtctcaattgtgtctatccttctcctttatcatggttccattctctgccggaaagatgcagtggttttgcgtcgtcacttcctctggaagtagtttaagtcgagaagataagattgcacatcaggtattgcttattctggtcctggagggccaagtgttgtatcgacatgtcattggttttgtatcgttgtatgttatcacgtgtgctggaaatcacagcaagtatgaagt

SEQ ID NO: 1221 - protein, 163 aa, Panicum virgatum; identical to SEQ ID NO: 957
  misc_feature: Ceres CLONE ID no.1950900
  misc_feature: Bit score of 192.3 for HMM based on sequences of FIGURE 15.
  misc_feature (104)..(144): Pfam Name: zf-AN1 Pfam Description: AN1-like Zinc finger
  misc_feature (21)..(45): Pfam Name: zf-A20 Pfam Description: A20-like zinc finger
  misc_feature: Functional Homolog Of Ceres SEEDLINE ID no. ME02401 at SEQ ID NO. 749

SEQ ID NO: 1222 - protein, 233 aa, Zea mays
  misc_feature: Public GI ID no.41350259
  misc_feature: Bit score of 187.5 for HMM based on sequences of FIGURE 15.
  misc_feature (174)..(214): Pfam Name: zf-AN1 Pfam Description: AN1-like Zinc finger
  misc_feature (73)..(97): Pfam Name: zf-A20 Pfam Description: A20-like zinc finger
  misc_feature: Functional Homolog Of Ceres SEEDLINE ID no. ME02401 at SEQ ID NO. 749
MVSSPFDLKIWGFGSASRARSGPSSFFPLLYLIGFFASFTQGSSERNRKEGRLIRVKEAMEHKEAGCQAPEGPILCINNCGFFGSAATMNMCSKCHKEMITKQDQAKLAASSIDSIVDGSDAVMEPGGAGSNTVVAVAQVELQKKNVQQPADVAEPNEGVAAISKGGKVGPNRCSACRKRVGLTGFNCRCGNLYCALHRYSDKHDCKFDYRTAARDAIAKANPVVKADKLDKI

SEQ ID NO: 1223 - protein, 213 aa, Oryza sativa subsp. japonica
  misc_feature: Public GI ID no.125588210
  misc_feature: Bit score of 189.3 for HMM based on sequences of FIGURE 15.
  misc_feature (154)..(194): Pfam Name: zf-AN1 Pfam Description: AN1-like Zinc finger
  misc_feature (74)..(98): Pfam Name: zf-A20 Pfam Description: A20-like zinc finger
  misc_feature: Functional Homolog Of Ceres SEEDLINE ID no. ME02401 at SEQ ID NO. 749
MGGIPFENGSSPIRQGSSSQLLLPLGDQMQWSFISTILCDLEPYWQVQLVFLTMAQESWKKEAEETGVHTPEAPILCVNNCGFFGSRMTENMCSKCYRDTVKAKTVATVVEKKPLASLSSTPLVTEVTDGGSGSVADGKQVMEEDTPKPPSNRCLSCRKKVGLTGFKCRCGGTFCSMHRYADSHKCTFDYKQVGREQIAKQNPLVKADKITKI

SEQ ID NO: 1224 - DNA, 820 bp, Panicum virgatum
  misc_feature: Ceres CLONE ID no.1954395
  misc_feature: Encodes the peptide sequence at SEQ ID NO. 1225
gccctcgccctcgccttcgccttcgcctacctctcgacgcccaaccccaaaaagaaaaattctcctcgcggagaaaggtcgcgtgccgtctcgcccacagcccatctgtaacaatggcacaggagagctggaaacaggaatctgaggagactggagtccatgcacctgaggccccaattctgtgcataaacaactgtggtttcttcggcagcagcatgacgaacaatatgtgctcgaagtgctacagggacttcatcaaattgatggaaggccctgtggttgagaagaaggtgatcacggtggcatcttcttctgcggcaccaatggagacagcaaagcaagatgatgtgcctgcagctgctgccactgaagctgtgacggagaagcaagcagagcaggagccgccaaagccgcccagcaaccggtgccttacctgccgcaagaaggttgggctgactggcttcctctgccgctgcgggggcaccttctgctccatgcaccgctacactgactcccaccagtgcaccttcgactacaagaaggtggcacgggagcagattgccaagcaaaatccagttgtgatggcagagaagattaacaagatatgatgcatggtcatgtgaagggatcactaaattcatgcctgggtagtgggttcactccaaatgataggttccttcaggcggtggtctgggtctgggttagagtggtagctggtctcaattgtgtctatcctcctcctttatcatggtttcattctctcgattgtgtaataatgtaaatatattcaaactgtaatttaatcctattgcttcctact

SEQ ID NO: 1225 - protein, 164 aa, Panicum virgatum
  misc_feature: Ceres CLONE ID no.1954395
  misc_feature: Bit score of 189.5 for HMM based on sequences of FIGURE 15.
  misc_feature (105)..(145): Pfam Name: zf-AN1 Pfam Description: AN1-like Zinc finger
  misc_feature (21)..(45): Pfam Name: zf-A20 Pfam Description: A20-like zinc finger
  misc_feature: Functional Homolog Of Ceres SEEDLINE ID no. ME02401 at SEQ ID NO. 749
MAQESWKQESEETGVHAPEAPILCINNCGFFGSSMTNNMCSKCYRDFIKLMEGPVVEKKVITVASSSAAPMETAKQDDVPAAAATEAVTEKQAEQEPPKPPSNRCLTCRKKVGLTGFLCRCGGTFCSMHRYTDSHQCTFDYKKVAREQIAKQNPVVMAEKINKI

SEQ ID NO: 1226 - protein, 173 aa, Arabidopsis thaliana
  misc_feature: Public GI ID no.18403408
  misc_feature: Bit score of 150.6 for HMM based on sequences of FIGURE 15.
  misc_feature (114)..(154): Pfam Name: zf-AN1 Pfam Description: AN1-like Zinc finger
  misc_feature (15)..(39): Pfam Name: zf-A20 Pfam Description: A20-like zinc finger
  misc_feature: Functional Homolog Of Ceres SEEDLINE ID no. ME02401 at SEQ ID NO. 749
MDHDKTGCQSPPEGPKLCTNNCGFFGSAATMNMCSKCHKDMLFQQEQGAKFASAVSGTSSSSNIIKETFTAALVDIETKSVEPMTVSVQPSSVQVVAEVVAPEEAAKPKGPSRCTTCNKRVGLTGFKCRCGSLFCGTHRYADVHDCSFNYHAAAQEAIAKANPVVKAEKLDKI

SEQ ID NO: 1227 - DNA, 965 bp, Panicum virgatum
  misc_feature: Ceres CLONE ID no.2010121
  misc_feature: Encodes the peptide sequence at SEQ ID NO. 1228
cctggcccgacgacgcccccatttcgaggctcctccttgcgattccaatccccgcccgcctcctccgcctccgcgtccgcctcgcgcagggtttggcttatagtagtcatggaacacaaggagacgggctgccagcaaccggagggcccaatactatgcatcaacaactgtggcttctttggcagtgcggccaccatgaacatgtgctccaagtgccacaaggagatgataatgaagcaggagcattcccagctggctgcctcctccattgatagcattgtcaatggcggtgatggtgggaaaggccctatcatagctgcaaccgcagaggtggcggttgctcaagttgaggagaagactattgttgtgcagcctccatttgtagctgaaaccagcgaggctgctgccattatccccaaggccaaggaaggtccgaaccggtgcgcaacctgtaggaagcgggttggtctgacgggattcaactgccgatgcggtaacatgtactgtgcgttgcaccgctactccgacaaacatgactgccagtttgactaccagactgcagctagggatgcgattgccaaggccaatcctgtggtgaaggcggagaagcttgaaaagatctgaagggggcaatggggaacgaaatgggttgcgatctgcaagattcaatcatgcatctttgctgctttatcattgaacatcccattcttgtttgctgccacatccctgagtcgttcaacactatgatgctcacgcatcctggcagctgcaagaagtcatcctcagtcgagtccaaaatggtttgcgtgttggctatgttgtgtaagcttattcagttattcatggtggtttcagtcggtattgtggcatttccatttaggtagctctgtaatgtactactgtctcatgcgtgttacattccaatcagtaatagtaatcagcaatggtctgcaatatttcctctt

SEQ ID NO: 1228 - protein, 171 aa, Panicum virgatum
  misc_feature: Ceres CLONE ID no.2010121
  misc_feature: Bit score of 179.7 for HMM based on sequences of FIGURE 15.
  misc_feature (112)..(152): Pfam Name: zf-AN1 Pfam Description: AN1-like Zinc finger
  misc_feature (14)..(38): Pfam Name: zf-A20 Pfam Description: A20-like zinc finger
  misc_feature: Functional Homolog Of Ceres SEEDLINE ID no. ME02401 at SEQ ID NO. 749
MEHKETGCQQPEGPILCINNCGFFGSAATMNMCSKCHKEMIMKQEHSQLAASSIDSIVNGGDGGKGPIIAATAEVAVAQVEEKTIVVQPPFVAETSEAAAIIPKAKEGPNRCATCRKRVGLTGFNCRCGNMYCALHRYSDKHDCQFDYQTAARDAIAKANPVVKAEKLEKI

SEQ ID NO: 1229 - DNA, 519 bp, Sorghum bicolor; identical to SEQ ID NO: 804
  misc_feature: Ceres ANNOT ID no.6011486
  misc_feature: Encodes the peptide sequence at SEQ ID NO. 1230

SEQ ID NO: 1230 - protein, 172 aa, Sorghum bicolor; identical to SEQ ID NO: 805
  misc_feature: Ceres ANNOT ID no.6011486
  misc_feature: Bit score of 200.6 for HMM based on sequences of FIGURE 15.
  misc_feature (113)..(153): Pfam Name: zf-AN1 Pfam Description: AN1-like Zinc finger
  misc_feature (21)..(45): Pfam Name: zf-A20 Pfam Description: A20-like zinc finger
  misc_feature: Functional Homolog Of Ceres SEEDLINE ID no. ME02401 at SEQ ID NO. 749

SEQ ID NO: 1231 - protein, 173 aa, Arabidopsis thaliana
  misc_feature: Public GI ID no.25082726
  misc_feature: Bit score of 151.8 for HMM based on sequences of FIGURE 15.
  misc_feature (114)..(154): Pfam Name: zf-AN1 Pfam Description: AN1-like Zinc finger
  misc_feature (15)..(39): Pfam Name: zf-A20 Pfam Description: A20-like zinc finger
  misc_feature: Functional Homolog Of Ceres SEEDLINE ID no. ME02401 at SEQ ID NO. 749
MDHDKTGCQSPPEGPKLCTNNCGFFGSAATMNMCSKCHKDMLFQQEQGTKFASAVSGTSSSSNIIKETFTAALVDIETKSVEPMTVSVQPSSVQVVAEVVAPEEAAKPKGPSRCTTCNKRVGLTGFKCRCGSLFCGTHRYADVHDCSFNYHAAAQEAIAKANPVVKAEKLDKI

SEQ ID NO: 1232 - protein, 173 aa, Camellia sinensis; identical to SEQ ID NO: 798
  misc_feature: Public GI ID no.113196593
  misc_feature: Bit score of 384.7 for HMM based on sequences of FIGURE 15.
  misc_feature (114)..(154): Pfam Name: zf-AN1 Pfam Description: AN1-like Zinc finger
  misc_feature (15)..(39): Pfam Name: zf-A20 Pfam Description: A20-like zinc finger
  misc_feature: Functional Homolog Of Ceres SEEDLINE ID no. ME02401 at SEQ ID NO. 749

SEQ ID NO: 1233 - DNA, 972 bp, Gossypium hirsutum
  misc_feature: Ceres CLONE ID no.1843021
  misc_feature: Encodes the peptide sequence at SEQ ID NO. 1234
ttttctgctatcagtttcattacataatatatctcttcgattaaagaatcgctgggttcgattttgtcagacaagatcggccaaattaagatttcaggagattagagaagatggaccctcatgatgagacgggccgccaagcttcagaaggccccatcctgtgtgttaataactgtggtttctttggaagtgcggcgaccatgaatatgtgctccaaatgtcacaaggcaatgatcctgaagcaggaacaggcacaactcgtagcatcatccatcgatagcattgttaatggcagcactagcgggaatggtaaggaaccatctgttgctgctgctttggctgtgcaatgtggaaattttgggtcaaaaattgaatcatccatcgatccatcccatatgaccttcggtgggatgaaaacaaaagagggtcccaacaggtgtaatgcatgccacaagcgtgttggtttgacaggatttagctgcaggtgtggaaacatcttctgtgcagcacataggtactctgacaaacacaactgtcctttcgattataggacagctgcccgcgatgctattgctaaagccaacccggtagtgagggctgagaaacttgataaaatctaaaaagagtcgaggatgaagatgaaggtgaaggtgaagaattgtgtaatgaagtatggggtttatggtcctacccattgtgtcgtcagctcatcatagtgaaggtttatttaaagttgggtgctttgtctcattaggtgtcccctttgatttgatataaaaaacaagttggaaagtggatagggaggacaccattgcagtgtaaggaaagtctatattccttgtcaatttgttggcgatacatttaagttcgcccctgtttgtaagtctttgtttgtgctggtttgatggaacaatcgatatgatcgccttgtaatgcttcttttcatatgcacttctttcttctagtagcacc

SEQ ID NO: 1234 - protein, 169 aa, Gossypium hirsutum
  misc_feature: Ceres CLONE ID no.1843021
  misc_feature: Bit score of 173.5 for HMM based on sequences of FIGURE 15.
  misc_feature (110)..(150): Pfam Name: zf-AN1 Pfam Description: AN1-like Zinc finger
  misc_feature (15)..(39): Pfam Name: zf-A20 Pfam Description: A20-like zinc finger
  misc_feature: Functional Homolog Of Ceres SEEDLINE ID no. ME02401 at SEQ ID NO. 749
MDPHDETGRQASEGPILCVNNCGFFGSAATMNMCSKCHKAMILKQEQAQLVASSIDSIVNGSTSGNGKEPSVAAALAVQCGNFGSKIESSIDPSHMTFGGMKTKEGPNRCNACHKRVGLTGFSCRCGNIFCAAHRYSDKHNCPFDYRTAARDAIAKANPVVRAEKLDKI

SEQ ID NO: 1235 - DNA, 1006 bp, Gossypium hirsutum
  misc_feature: Ceres CLONE ID no.1931194
  misc_feature: Encodes the peptide sequence at SEQ ID NO. 1236
atttttaaaaaaatcctcctaaaaaagaaaaagaaaaaatcacccgcaatttctctttctcctatcagtttcgttacataatatatctcttcgattaaagaatcgctgggttcgattttgtcagacaagatcggccaaattaagatatcagagaagatggaccctcttgatgagacaggccgccaagcttcagaaggccccatcctgtgtgttaataactgtggtttctttggaagtgcggctaccatgaatatgtgctccaaatgtcacaaggcaatgatcctgaagcaggaacaggcacaactcgtagcatcatccatcgatagcattgttaatggcagcactagcgggaatggtaaggaaccatctgttgctgctgctttggctgtgcaatgtggaaattttgggtcaaaaattgaatcatccatcgatccatcccatatgaccttcggtgggatgaaaacaaaagagggtcccaacaggtgtaatgcatgccacaagcgtgttggtttgacaggatttagctgcaggtgtggaaacatcttctgtgcagcgcataggtactctgacaaacacaactgtcctttcgattataggacagccgcccgcgatgctattgctaaagccaatccggtagtgagggctgagaaacttgataaaatctaaaaagagtagaggatgaaggtgaaggtgaagaattgtgtaatgaagtatggggtttatggtcctacccattgtgtcgtcagctcatcatagtgaaggtttatttaaagttgggtgctttgtctcattaggtgtcccctttgatttgatataaaaaacaagttggaaagtggataatagggaggacaccattgcagtgtaaggaaagtctatattccttgtcaatttgttggcgatacatttaagttcgcccctgtttgtaagtctttgtttgtgctggtttgatggaacaatcgatatgatcgccttgtaatgcttcttttcatatgcacttctttcttcc

SEQ ID NO: 1236 - protein, 169 aa, Gossypium hirsutum
  misc_feature: Ceres CLONE ID no.1931194
  misc_feature: Bit score of 172.8 for HMM based on sequences of FIGURE 15.
  misc_feature (110)..(150): Pfam Name: zf-AN1 Pfam Description: AN1-like Zinc finger
  misc_feature (15)..(39): Pfam Name: zf-A20 Pfam Description: A20-like zinc finger
  misc_feature: Functional Homolog Of Ceres SEEDLINE ID no. ME02401 at SEQ ID NO. 749
MDPLDETGRQASEGPILCVNNCGFFGSAATMNMCSKCHKAMILKQEQAQLVASSIDSIVNGSTSGNGKEPSVAAALAVQCGNFGSKIESSIDPSHMTFGGMKTKEGPNRCNACHKRVGLTGFSCRCGNIFCAAHRYSDKHNCPFDYRTAARDAIAKANPVVRAEKLDKI

SEQ ID NO: 1237 - DNA, 622 bp, Panicum virgatum
  misc_feature: Ceres CLONE ID no.2025938
  misc_feature: Encodes the peptide sequence at SEQ ID NO. 885
ttgcctttgcccgctgcgcttgcgcgtccgcggaaggaaggggacgacgacgcgtccccgtctccccgattaaaagggcccgggcgcctctcgtccattcctcgctcctcgccgatcacagcagcgacctcctccccaatcccgatttcgcgagctcgtcccccgcctcccggcctctcccgtctccccgccccccgcccgccctccgagaagcgaagctccgggccgcgccaccgcgcaggcacacccaaggcagcaggcgcggttccttccaccaggtgcgcgggcggcggcatggcgcagcgcgacaagaaagaggagcccacggagctccgggcgccggagatcacgctctgcgccaacaactgcggcttcccggggaacccggccacgcagaacctctgccagagctgcttctcggcggccacggcgtcgatgtcgtcgccgacctcctcctcgtcctccccggctcccgcgccggccgcggcgccccagccgaggccggcgccggtggagctggcctccccggccgacgcggccgtggcggccccggctccggaggcggcgaggacgccggcgaaccggtgctcgagctgccggaagcgggtggggctcacggggt

SEQ ID NO: 1238 - protein, 172 aa, Panicum virgatum
  misc_feature: Ceres CLONE ID no.1783953
  misc_feature: Bit score of 361.3 for HMM based on sequences of FIGURE 15.
  misc_feature (98)..(138): Pfam Name: zf-AN1 Pfam Description: AN1-like Zinc finger
  misc_feature (18)..(42): Pfam Name: zf-A20 Pfam Description: A20-like Zinc finger
  misc_feature: Functional Homolog Of Ceres SEEDLINE ID no. ME02401 at SEQ ID NO. 749
MESHDETGCQAPEGPILCINNCGFFGSAATMNMCSKCHKAMILKQEQAQLAASSIGSIVNGSSTGNGKEPAVATALDVQSGNADTKMVSTELPIDPSGTTSCGMKMKEGPNRCTKCCKRVGLTGFNCRCGNLFCAAHRYSDKHDCPFDYRAAARNAIAKANPVVRAEKLDKI

SEQ ID NO: 1239 - DNA, 715 bp, Gossypium hirsutum
  misc_feature: Ceres CLONE ID no.1930044
  misc_feature: Encodes the peptide sequence at SEQ ID NO. 1240
aaaataaaatccaaaaagaaaaatcatacgatcaaagatcgtctttctcgtctggatttctccgattatcatacataaaactcttcgattaaggggattagagaagatggagtctcacgatgagacagggtgccaagccccagaaggccccattctttgtatcaacaactgtggcttcttcggcagtgcagctaccatgaatatgtgctccaagtgtcacaaagcgatgatcctgaagcaggaacaggcgcaacttgcagcatcatcaatcggaagcatcgtgaatggcagctcaactgggaacggtaaggaaccagccgtggctactgctttggatgtacaatctggaaacgccgacaccaaaatggtctcaacagagctacccattgacccatccggaacgacttcatgtgggatgaaaatgaaagagggtcctaacaggtgtaccaaatgctgtaaacgtgttggtttgacaggatttaactgcaggtgtggaaacctcttctgtgcagctcatcgttactccgacaaacatgactgccctttcgattaccgagctgctgctcgcaatgctattgctaaagccaacccagttgttcgggcagagaagctcgataaaatctgagaacaacccgggtcaagatgaagatatgtggatggtttatgttagttggttacttgtctcatcaagtgtccccttgattgatattaaatg

SEQ ID NO: 1240 - protein, 172 aa, Gossypium hirsutum; identical to SEQ ID NO: 1238
  misc_feature: Ceres CLONE ID no.1930044
  misc_feature: Bit score of 182.6 for HMM based on sequences of FIGURE 15.
  misc_feature (113)..(153): Pfam Name: zf-AN1 Pfam Description: AN1-like Zinc finger
  misc_feature (15)..(39): Pfam Name: zf-A20 Pfam Description: A20-like zinc finger
  misc_feature: Functional Homolog Of Ceres SEEDLINE ID no. ME02401 at SEQ ID NO. 749

SEQ ID NO: 1241 - DNA, 973 bp, Arabidopsis thaliana
  misc_feature: Ceres CLONE ID no.24255
  misc_feature: Encodes the peptide sequence at SEQ ID NO. 1242
aacacatctctctctctctctctctctttctctctttttatatttttgtgtcccaatctcttcttcatttctgtttggttgccgagaaaacgcaggaaacttttctgcaaaaaaactcggtgaccatatttaaaactttcccacgttaattctctcttctttgttttgtttcagattcattacttttctccaaaaaactttcttcaagatctgctcttttaaataattatggcggaagaacatcgatgcgagacgcctgaaggtcaccgtctctgcgttaacaactgcggtttcttcggaagctcagcgacaatgaatctatgttcaaactgttacggcgatctctgtctcaaacaacaacaacaagcttccatgaaatcaaccgtcgaatcatctctctctccggtgatcgcacctgttctcgaaaactacgcggcggagttagagatcccgacgacgaagaagacagaggagaaaaaaccgattcaaattccgacggagcaaccgtctccgccgcaacggccgaatcgatgcaccgtatgtaggaaacgggtcgggttaaccgggtttatgtgtcggtgcgggacgactttttgtgggagtcataggtatccggaggttcatggttgtacgtttgatttcaaatcggcgggacgtgaagagatcgcgaaagctaatccgttggttattgcggcgaagcttcagaaaatatgaatcggagccgttgaccgatttctatctttaccctgagaaaatttcgattgtctcggtggatctcagccgttcattatgttattgtattacggacacgtgtcgcaagattaaggttgagatggtttcgtaactttttaattattttctttgtttatttccgaagaaattaaagtttttatgattgtgtggcttttgcttgtaaaaaaaaaaagggtttctctttgggaaaaagaaaagaaaatatatgaaattgtgtccc

SEQ ID NO: 1242 - protein, 161 aa, Arabidopsis thaliana; identical to SEQ ID NO: 742
  misc_feature: Ceres CLONE ID no.24255
  misc_feature: Bit score of 382.2 for HMM based on sequences of FIGURE 7.
  misc_feature (102)..(142): Pfam Name: zf-AN1 Pfam Description: AN1-like Zinc finger
  misc_feature (13)..(37): Pfam Name: zf-A20 Pfam Description: A20-like zinc finger
  misc_feature: Functional Homolog Of Ceres SEEDLINE ID no. ME04477 at SEQ ID NO. 742

SEQ ID NO: 1243 - DNA, 543 bp, Sorghum bicolor
  misc_feature: Ceres ANNOT ID no.6034955
  misc_feature: Encodes the peptide sequence at SEQ ID NO. 1244
atggcgcagaagcgaaagagcatcgacgtcgtcgaggactgcggcggccacgcgcccgccgccaggcggtgtgcgaacgggtgcgggtacttcggcaacgccgcgaccggcggcatgtgctccaagtgctaccgcaagcacgccgccgccggcgccacggcgacgtctacctctaccaccaccgctgacaagaagacgacgacggcgcaggctgtttccgagacgccggcgccggcggagaagaaggccaagatcgcgtgcgccgtcgcgtcgtcgtcccctggcggcggcgtcgacaatgcaggcgcggcccgggctccgtccacggagccgcagccggtgaagcagactgcgaaccggtgctcggcgtgccgcaagaaagtgggcctgctggggttccggtgctgctgcggggaaaccttctgcggcgcgcaccggtacgcggagaagcacgcctgcggctacgactacaaaagcgccggccgcgagcggatcgccaagaacaacccggtcgtcgtcgccgacaagatcgccaagatttga

SEQ ID NO: 1244 - protein, 180 aa, Sorghum bicolor
  misc_feature: Ceres ANNOT ID no.6034955
  misc_feature: Bit score of 161.7 for HMM based on sequences of FIGURE 15.
  misc_feature (121)..(161): Pfam Name: zf-AN1 Pfam Description: AN1-like Zinc finger
  misc_feature (21)..(45): Pfam Name: zf-A20 Pfam Description: A20-like zinc finger
  misc_feature: Functional Homolog Of Ceres SEEDLINE ID no. ME02401 at SEQ ID NO. 749
MAQKRKSIDVVEDCGGHAPAARRCANGCGYFGNAATGGMCSKCYRKHAAAGATATSTSTTTADKKTTTAQAVSETPAPAEKKAKIACAVASSSPGGGVDNAGAARAPSTEPQPVKQTANRCSACRKKVGLLGFRCCCGETFCGAHRYAEKHACGYDYKSAGRERIAKNNPVVVADKIAKI

SEQ ID NO: 1245 - DNA, 453 bp, Sorghum bicolor
  misc_feature: Ceres ANNOT ID no.6119444
  misc_feature: Encodes the peptide sequence at SEQ ID NO. 1246
atggcggaggagcagcagcagcagcagcagcagaggtggcaggacggccaccgcctgtgcgccaacaactgcggcttcttcggcagccccgcgacgctggacctctgctccaagtgctaccgcgacctgtacccgcaggagcagcagcagccagcaccagcgggccccttcgttcctgccgcgtcggccttccatccttcctcctcgtcggtctctcccgagcccgagcctccggcggcctctgctgcaggcgccaaggccggcaggtgcgccagctgccggaagcgcgtgggcctgacggggttcgcgtgccgctgcggcgccaccttctgcggcgtgcaccggtacccggagcggcacgcgtgcgccttcgacttccgcgccgccggccgcgacgccatcgcgcgcgccaaccccgtcgtcaagggcgacaagctcaaggacaagatctga

SEQ ID NO: 1246 - protein, 150 aa, Sorghum bicolor
  misc_feature: Ceres ANNOT ID no.6119444
  misc_feature: Bit score of 139.1 for HMM based on sequences of FIGURE 15.
  misc_feature (17)..(41): Pfam Name: zf-A20 Pfam Description: A20-like zinc finger
  misc_feature (90)..(130): Pfam Name: zf-AN1 Pfam Description: AN1-like Zinc finger
  misc_feature: Functional Homolog Of Ceres SEEDLINE ID no. ME02401 at SEQ ID NO. 749
MAEEQQQQQQQRWQDGHRLCANNCGFFGSPATLDLCSKCYRDLYPQEQQQPAPAGPFVPAASAFHPSSSSVSPEPEPPAASAAGAKAGRCASCRKRVGLTGFACRCGATFCGVHRYPERHACAFDFRAAGRDAIARANPVVKGDKLKDKI

SEQ ID NO: 1247 - DNA, 600 bp, Sorghum bicolor
  misc_feature: Ceres ANNOT ID no.6063956
  misc_feature: Encodes the peptide sequence at SEQ ID NO. 1248
atggcggagaggcaggaggtcatctccggcgtcggtgcggcagcggcaccgatgtgcgccaacggctgcgggttcttcgggagcgcggcgaccaacaacttctgctcaacgtgctacaagcaggatcacctgatgatcaccaagaccgccggcgccggcgccgctcccctggaagcgtccggccgccgcggcctcatcgagtgcgccaacgcgtgcggttacttcgggtacccagcgaccaacaacctgtgcaccctctgctacagggacttcctcgaaagcgttcactcctcccctgccgcggcggacaaggtcgtcgtcctcgctgccgagcagccggcggcggcccagatctctgctgcaacttctagtgctacacgggcggtggaggcggcggcggcggcggcgtcgagcaggtgcgcgtcgtgccgcaagaaggtggggctgctggggtttccctgccgctgtggcggcacgttctgcgcgctgcaccggtacgcggagaagcacgcctgcggcttcgacttcaaggcggcgggccgggagaagatcgccaagaacaacccgctcgtcgtggccgccaagatcaacaagatctga

SEQ ID NO: 1248 - protein, 199 aa, Sorghum bicolor
  misc_feature: Ceres ANNOT ID no.6063956
  misc_feature: Bit score of 133.6 for HMM based on sequences of FIGURE 15.
  misc_feature (140)..(180): Pfam Name: zf-AN1 Pfam Description: AN1-like Zinc finger
  misc_feature (16)..(40): Pfam Name: zf-A20 Pfam Description: A20-like zinc finger
  misc_feature: Functional Homolog Of Ceres SEEDLINE ID no. ME02401 at SEQ ID NO. 749
MAERQEVISGVGAAAAPMCANGCGFFGSAATNNFCSTCYKQDHLMITKTAGAGAAPLEASGRRGLIECANACGYFGYPATNNLCTLCYRDFLESVHSSPAAADKVVVLAAEQPAAAQISAATSSATRAVEAAAAAASSRCASCRKKVGLLGFPCRCGGTFCALHRYAEKHACGFDFKAAGREKIAKNNPLVVAAKINKI

SEQ ID NO: 1249 - DNA, 570 bp, Sorghum bicolor
  misc_feature: Ceres ANNOT ID no.6015461
  misc_feature: Encodes the peptide sequence at SEQ ID NO. 1250
atgtcgcggcagcagataggtggcggtggcagcgccacgccgatgtgcgccgcgggctgcggtttctttgggagcccggcgaccctcggcatgtgctccgtctgctacaagaagcactgctgcaccattacggacggtccaggcgcctcctacgccgcaacggcgatcgatcccgtcgtcacccgatccaccgctaccgcggtgacccccgggcccggcgccgccgcggctaagccaacggtggtggccgcgcgcacgcccgccgcgagcgtctgtttgttggctcctgctgctaaaggcgccgtagcggaggccgccgccgtgtcgccgccccacgctcccgaggcggcggcgaagaagaagaaggcgccgccaccgggccggtgcgcggcgtgctgcaagaaggtggggctcacggggttcgtgtgccgatgcgggaacacgttctgcgggagccaccggtacgcggaggagcacggctgcagcttcgacttcaagggcgccagccgtgacgccatcgcccgcgccaacccggtcatcaaggcggagaagctgaccggcaagatctga

SEQ ID NO: 1250 - protein, 189 aa, Sorghum bicolor
  misc_feature: Ceres ANNOT ID no.6015461
  misc_feature: Bit score of 109.3 for HMM based on sequences of FIGURE 15.
  misc_feature (129)..(169): Pfam Name: zf-AN1 Pfam Description: AN1-like Zinc finger
  misc_feature (13)..(37): Pfam Name: zf-A20 Pfam Description: A20-like zinc finger
  misc_feature: Functional Homolog Of Ceres SEEDLINE ID no. ME02401 at SEQ ID NO. 749
MSRQQIGGGGSATPMCAAGCGFFGSPATLGMCSVCYKKHCCTITDGPGASYAATAIDPVVTRSTATAVTPGPGAAAAKPTVVAARTPAASVCLLAPAAKGAVAEAAAVSPPHAPEAAAKKKKAPPPGRCAACCKKVGLTGFVCRCGNTFCGSHRYAEEHGCSFDFKGASRDAIARANPVIKAEKLTGKI

SEQ ID NO: 1251 - DNA, 1324 bp, Triticum aestivum
  misc_feature: Ceres CLONE ID no.696244
  misc_feature: Encodes the peptide sequence at SEQ ID NO. 1252
atgcgcaacgccggctgttgaatattcttgctctatataaagggtccgttgctctgcatatggtgtacaagaacagagagggacagacacatttaacccaaggaccacgtacttccctagcttcttcccacgttgagctgagcgatggaccgacaagttcccgctacagatccttggtggtaccccggcgaggccgcagcatccaccggcgacgacgacttcctcgacattgaaggtctactcgggttggcgtgggaaggaggcacggctcttcccggcgtcggctctccgccaccggcgctggggccaccgtgcgcgtcgcctccagagccaacaccttccgaagacgtgatggcagcgtggctctacccgatcgtcagtggcgaggacaatgccggggacggccccatggtgaagggcaaaccgtcggccaaggcgtcggggagtttggggatgacggagagcgaggggaatcttccggctacggacggcatgtaccatgtcaaggagagctgtgatctcaacaaggacgaggccgagatcctgaagccatcctcctccacaccttcgcctccttccccaaccacaccaccaccaccaaccgctcaaataccagaaccgcaacctccacagtcgccaccacaaccaccggcagctcaattcttgtccaggccctgtgaagttgttcacatagagacttccaaaaagaggaaacatgctgatgcggtgtcaatggccatggcggctgcgccattgtcgcctgtgctgtttgttaaccgttgcaacgtgtgccgcaagagagttggtttgaccgggtttcgttgccggtgcgagaagctcttttgtccgcgccaccggcattcagaaagccacgactgctcatttgattataaaactgcgggccgggaggagattgcccgggcaaaccctcttatcagggctgccaagatcattaggatatgaggttcatctaagaattatatgaaagacttaaatcttggagatgctgcaagtgtatcatgctgtcattccaaggatgatccgaaagcatgaccactgccaacttgtgaagacattccccaaacaactaagctcttagtagcatacaagcctacattgagcaagagttggttgttgtgggagaatgcttcactcttgttcttcgtctggctatggttcactctatagcatctgaagctaccatgaacacagatgatagaacctatagtgtccagttgtaattctgttggatccaaagatttgttatattgtaatctttctttactattgttcaaattctacttaatgcaattgtgtgttactc

SEQ ID NO: 1252 - protein, 156 aa, Triticum aestivum
  misc_feature: Ceres CLONE ID no.696244
  misc_feature: Bit score of 105.4 for HMM based on sequences of FIGURE 15.
  misc_feature (97)..(137): Pfam Name: zf-AN1 Pfam Description: AN1-like Zinc finger
  misc_feature (18)..(42): Pfam Name: zf-AN1 Pfam Description: AN1-like Zinc finger
  misc_feature: Functional Homolog Of Ceres SEEDLINE ID no. ME02401 at SEQ ID NO. 749
MYHVKESCDLNKDEAEILKPSSSTPSPPSPTTPPPPTAQIPEPQPPQSPPQPPAAQFLSRPCEVVHIETSKKRKHADAVSMAMAAAPLSPVLFVNRCNVCRKRVGLTGFRCRCEKLFCPRHRHSESHDCSFDYKTAGREEIARANPLIRAAKIIRI

SEQ ID NO: 1253 - DNA, 444 bp, Populus balsamifera subsp. trichocarpa
  misc_feature: Ceres ANNOT ID no.1468973
  misc_feature: Encodes the peptide sequence at SEQ ID NO. 1254
atggactcgataaacagctcaactcttcctttgtgtgccaagggttgcgggttctttggttctccagagaacgagaatttttgttcaaagtgttataaagagtatctcaaagaagggttaattgctgagccttccaagaaactctctgaacctatcgtagtcaccccatcttttgatgataatagcccagatgttgttaccgacgaaacaacttcaacaactactgctgttgcatccacttcaaaagtgaagaatagatgtgaatgctgcaacaagaaagttggtttgatggggttcgagtgccgctgtgggaacaccttctgtggggttcatcgatatcctaaggagcactcttgtacttttgatttcaagactcttgatcaacaaaatttggccaagcaaaatccacttgttgcaggtgataaacttggttccagaatttga

SEQ ID NO: 1254 - protein, 147 aa, Populus balsamifera subsp. trichocarpa
  misc_feature: Ceres ANNOT ID no.1468973
  misc_feature: Bit score of 84.4 for HMM based on sequences of FIGURE 15.
  misc_feature (87)..(127): Pfam Name: zf-AN1 Pfam Description: AN1-like Zinc finger
  misc_feature (9)..(33): Pfam Name: zf-A20 Pfam Description: A20-like zinc finger
  misc_feature: Functional Homolog Of Ceres SEEDLINE ID no. ME02401 at SEQ ID NO. 749
MDSINSSTLPLCAKGCGFFGSPENENFCSKCYKEYLKEGLIAEPSKKLSEPIVVTPSFDDNSPDVVTDETTSTTTAVASTSKVKNRCECCNKKVGLMGFECRCGNTFCGVHRYPKEHSCTFDFKTLDQQNLAKQNPLVAGDKLGSRI

SEQ ID NO: 1255 - DNA, 642 bp, Panicum virgatum
  misc_feature: Ceres CLONE ID no.2019529
  misc_feature: Encodes the peptide sequence at SEQ ID NO. 1256
gccttcgcctacctctcgacgcccaaccccaaaaagaaaaattctcctcgcggagaaaggtcgcgtgccgtctcgcccacagttccgggcactgattgcttcgcctgtatgctgctggttgcctgccttgtgctgctactacatatgcaatctgtggagcaaccaaaaagaccttggcttcatgctatgattgtgtaaagcaattgactaaccaagcccatctgtaacaatggcacaggagagctggaaacaggaatctgaggagactggagtccatgcacctgaggccccaattctgtgcataaacaactgtggtttcttcggcagcagcatgacgaacaatatgtgctcgaagtgctacagggacttcatcaaattgatggaaggccctgtggttgagaagaaggtgatcacggtggcatcttcttctgcggcaccaatggagacagcaaagcaagatgatgtgcctgcagctgctgccactgaagctgtgacggagaagcaagcagagcaggagccgccaaagccgcccagcaaccggtgccttacctgccgcaagaaggttgggctgactggcttcctctgccgctgcgggggcaccttctgctccatgcaccgctacactgactcccaccagtgcac

SEQ ID NO: 1256 - protein, 137 aa, Panicum virgatum
  misc_feature: Ceres CLONE ID no.2019529
  misc_feature: Bit score of 94.2 for HMM based on sequences of FIGURE 15.
  misc_feature (105)..(137): Pfam Name: zf-AN1 Pfam Description: AN1-like Zinc finger
  misc_feature (21)..(45): Pfam Name: zf-A20 Pfam Description: A20-like zinc finger
  misc_feature: Functional Homolog Of Ceres SEEDLINE ID no. ME02401 at SEQ ID NO. 749
MAQESWKQESEETGVHAPEAPILCINNCGFFGSSMTNNMCSKCYRDFIKLMEGPVVEKKVITVASSSAAPMETAKQDDVPAAAATEAVTEKQAEQEPPKPPSNRCLTCRKKVGLTGFLCRCGGTFCSMHRYTDSHQC

SEQ ID NO: 1257 - DNA, 626 bp, Zea mays
  misc_feature: Ceres CLONE ID no.1492169
  misc_feature: Encodes the peptide sequence at SEQ ID NO. 1258
gctcgctccctccctccctccctcccgcgcggatcacagaagggctcacggtcacggccggcctcccaattcgcaacctcgcctccgcctctcctcctaccccctccgaaaagcaagctccggccgggccgccaccaccaccaccgcgcgcgcgtgcacgcgctcccacacacagacagacagacagacagacagagtgagagacgcacggtggttcggggtctcccttctgccaggcgcacgaggagccatggcgcagcgcgacaagaaggaggagcccacggagctccgggcgccggagatcacgctgtgcgccaacaactgcgggttcccgggtaacccggccacgcagaacctgtgccagagctgcttctcggcgtcgaggtcgccgtcgtcccctacctcctcctcctcttccctggcgtccgcggcgtcgcagccgaggccagcagcgctcgtcgtagacgcggcagcggtggaggcgctggccgctccggcggccgcggccgcgggccagggccaggctacggaagccgcggcgagggcgtccgcgagccggtgctccagctgccggaagcgcgtggggctgacggggttccggtgccgctgcggcgagctcttctgcg

SEQ ID NO: 1258 - protein, 125 aa, Zea mays
  misc_feature: Ceres CLONE ID no.1492169
  misc_feature: Bit score of 142.8 for HMM based on sequences of FIGURE 15.
  misc_feature (104)..(125): Pfam Name: zf-AN1 Pfam Description: AN1-like Zinc finger
  misc_feature (18)..(42): Pfam Name: zf-A20 Pfam Description: A20-like zinc finger
  misc_feature: Functional Homolog Of Ceres SEEDLINE ID no. ME02401 at SEQ ID NO. 749
MAQRDKKEEPTELRAPEITLCANNCGFPGNPATQNLCQSCFSASRSPSSPTSSSSSLASAASQPRPAALVVDAAAVEALAAPAAAAAGQGQATEAAARASASRCSSCRKRVGLTGFRCRCGELFC

SEQ ID NO: 1259 - DNA, 449 bp, Glycine max
  misc_feature: Ceres CLONE ID no.1652996
  misc_feature: Encodes the peptide sequence at SEQ ID NO. 1238
aaacaacccctttctcttctcttccaattacaaatcccttcttctctctctctctctttattctcatttcacaactcatcaatcccctctctctctctcccaaacgcaaaacctaagcatggctcagaaggcccagaaaaacgacactgagtttaaggtccccgaacccatcatcaacccctgcaccaccaccaccaccaccaccacctcgatttccgaaccttctagattcttcgatgcaaccacccccgccacttcatcgcgctccccaaagcgatccctccctctcgacgaggaatctcagacggaccaaacgacgtcttctgagcccaaacgcgccgtgaaccgctgctccggctgccggcggcgcgtgggactcacgggattccggtgccgctgcggggaccttttctgcgcagagcaccgctactccgaccgccacgactgct

SEQ ID NO: 1260 - DNA, 1096 bp, Oryza sativa subsp. japonica
  misc_feature: Ceres SEEDLINE ID no.ME18396
  misc_feature: Encodes the peptide sequence at SEQ ID NO. 1012
cttgaacagaatattaagttgatcactttaaaatatctttccttggctatatatcctgaaaagctcacccatggcaactgtttctgcggtctcagctcctattagaaggcttgaggggaaagtggcgattatcactggtggtgcaagcggcataggtgaggccactgcaagactcttctctaagcacggagcacaccttgtcatagctgacattcaagacgatttgggcctctctctttgcaaacacttggaatccgcttcctatgttcactgcgacgtgacaaaggaagaggacgttgaaaactgcgtgaacacagcggtttccaagtatggaaaactagacatcatgcttaataacgcaggtatatgtgatgagatcaaaacaagcatactagacaacaacaagtctgattttgagagtgtcataagcgtgaacttggttggtccttttctgggaacaaagcacgctgcaagagtcatgatcgctgctaaaaggggaagcataattaacacagctagtgttgctggaatcttaggtggagtggctacacatgcctacacaagttcaaagcacgcgctaattggactgatgaaaagcactgcggtggagcttggacagtttggtattcgggtgaattgtgtgtccccttatgtggttcccacaccgttgaccaagaaacatgccaatattgacgaagaaggagttcgtgagatttattccaacctaaaaggtgttcatcttgtgccgaacgatgtggccgaagctgctctttacttggcaggtgatgagtctaagtatgttagtggtcacaatctcgtgttagatggtgggtttactaatgtaaatataggattttctgtgtttggacagtcggagtaaaaattgtatgtatgtctttaaataatttttgttggtgcgggtttgaagtgttaatttgtattgaggtacacatcaatcttgctttttagatttgctgaacttgaaattatgaccatcaagaacataaattatctcttcatggacatcccatcgaaaagattgtatcgtgttaggatgaccaaccaattaaagtatgctttcgatcttgaccaaatg

SEQ ID NO: 1261 - DNA, 669 bp, Sorghum bicolor
  misc_feature: Ceres Annot ID no. 8703793
  misc_feature: Encodes the peptide sequence at SEQ ID NO. 1262
atggcgatcgtctacgccctggtcgctcggggcacggtggttctggccgagttcgccgccgtctcaggcaacgccggcgccgtggcccgccggatcctcgagaagctgccgcccgacgccgagtccaggctgtgctttgcgcaggaccggtacatcttccacgtcctccggtctgacgccgccggcatcaccttcctctgtatggccaacgacaccttcggaagaagaatcccctttctctacctggaggacatccaaatgaggttcatgaaaaactacggcagagtcgcccactctgcgctggcttacgccatgaacgatgaattctccagggtgctccatcagcaaatggagttcttctccagcaacccaagtgctgacacactcaaccgtctccgcggagaagtcagtgagatacacaccgtcatggtcgacaacattgagaaaattcttgacagaggcgaccgcatctcgctccttgtggacaagacatccaccatgcaggacagctcctttcacttccgcaagcaatccaagaggctccgcagagctctttggatgaagaatgccaagcttctagttgtgttgacagttgtcatagtagtgctgctctacttgatcatttctgctttctgtggaggcctttccttatcatcatgcagatcatga

SEQ ID NO: 1262 - protein, 222 aa, Sorghum bicolor
  misc_feature: Ceres Annot ID no. 8703793
  misc_feature (1)..(222): Bit score of 583.0 for hmm based on sequences of FIGURE 13.
  misc_feature (125)..(213): Pfam Name: Synaptobrevin Pfam Description: Synaptobrevin
  misc_feature: Functional Homolog Of SEQ ID NO. 160
MAIVYALVARGTVVLAEFAAVSGNAGAVARRILEKLPPDAESRLCFAQDRYIFHVLRSDAAGITFLCMANDTFGRRIPFLYLEDIQMRFMKNYGRVAHSALAYAMNDEFSRVLHQQMEFFSSNPSADTLNRLRGEVSEIHTVMVDNIEKILDRGDRISLLVDKTSTMQDSSFHFRKQSKRLRRALWMKNAKLLVVLTVVIVVLLYLIISAFCGGLSLSSCRS

SEQ ID NO: 1263 - DNA, 663 bp, Sorghum bicolor
  misc_feature: Ceres Annot ID no. 8632125
  misc_feature: Encodes the peptide sequence at SEQ ID NO. 1264
atggggcagcagtcgctgatctacgcgttcgtggcccgtggcacggtcatactggccgagtacacggagttcaccggcaacttcaccaccatcgcctcccagtgcctcatgaagctccccgcaagcaacaacaagttcacctacaactgcgatggccacaccttcaattacctcgtggaagacggattcacatactgtgttgttgctgttgaatcagtggggcaacaaattcccattgctttcatggatagggttaaggaggatttcacaaaaaggtatggtggtgggaaagctgctactgctgcagctaacagcctcaaccgagagttcggatcaaaacttaaagagcacatgcagtattgtgtggatcaccctgaagaggttagcaagctggccaaagtgaaggcacaggtttcagaagtcaagggtgttatgatggagaacattgaaaaggttctagatcgtggagagaagattgagctgcttgttgacaagaccgagaatttgcgctcacaggcccaaaatttccggcagcaaggaacaaatgtgaggagaaagatgtggttacagaacatgaaaatcaagcttatcggcctgggaataataattgcacttattctgatcattatcctctctgtctgtcacggtttcaagtgccattaa

SEQ ID NO: 1264 - protein, 220 aa, Sorghum bicolor
  misc_feature: Ceres Annot ID no. 8632125
  misc_feature (1)..(220): Bit score of 171.2 for hmm based on sequences of FIGURE 13.
  misc_feature (127)..(215): Pfam Name: Synaptobrevin Pfam Description: Synaptobrevin
  misc_feature: Functional Homolog Of SEQ ID NO. 160
MGQQSLIYAFVARGTVILAEYTEFTGNFTTIASQCLMKLPASNNKFTYNCDGHTFNYLVEDGFTYCVVAVESVGQQIPIAFMDRVKEDFTKRYGGGKAATAAANSLNREFGSKLKEHMQYCVDHPEEVSKLAKVKAQVSEVKGVMMENIEKVLDRGEKIELLVDKTENLRSQAQNFRQQGTNVRRKMWLQNMKIKLIGLGIIIALILIIILSVCHGFKCH

SEQ ID NO: 1265 - protein, 226 aa, Zea mays
  misc_feature: Public GI ID no. 194699974
  misc_feature (1)..(226): Bit score of 541.8 for hmm based on sequences of FIGURE 13.
  misc_feature (129)..(217): Pfam Name: Synaptobrevin Pfam Description: Synaptobrevin
  misc_feature: Functional Homolog Of SEQ ID NO. 160
MGKIEYGVVARGAVVLAEHYGAAAAGGNAGAVARQVLERLPGGGDDDCNVSYTQDLHVFHVKRTDGLTALCMADDAAGRRVPFAFLEDIHGRFVKAYGRAALTALAYAMNDEFSRVLAQQMDYYSNDASADRINRMRGEMDQVRSVMMDNIDRVLERGDRLEVLVDKTATMQGNTMRFKRQARRFRNTMWWRNVKLTAAVIFILTVIVYVLLAYMCRGFTIPSCFP

SEQ ID NO: 1266 - DNA, 1008 bp, Zea mays
  misc_feature: Ceres Clone ID no. 100736041
  misc_feature: Encodes the peptide sequence at SEQ ID NO. 1267
ctacctcttcgctcccggctcccctccatctctttcgccacacgcgcgagaggggggagaggaaacagctagcagcgagcgaggaacgaagagggtgcttcgcacgtgcatgtgagatcgggcgatcccgatcgtcggccggcgcgaactaacgacgacgtacgtgcgaccgggccgggcgttgtaggacggcgcgcgcgatgggcaagatcgagtacggcgtggtggcgcgcggcgcggtggtgctggcggagcactacggcgcggcggcggcgggcggcaacgcgggcgccgtggcgcggcaggtcctggagcgcctccctggcggcggcgacgacgactgcaacgtgtcgtacacgcaggacctccacgtgttccacgtcaagcgcaccgacggcctcacggcgctctgcatggccgacgacgccgccgggcggcgtgtccccttcgcgttcctggaggacatccacgggaggttcgtcaaggcgtacggccgcgcggcgctcaccgcgctggcgtacgccatgaacgacgagttctcccgcgttctggcccagcagatggactactactccaacgacgccagcgcggacaggataaatcgcatgaggggagagatggaccaggtccggagcgtgatgatggacaacatcgacagggtgctggagaggggtgaccgtctggaggtgctggtggacaagacggcaaccatgcaggggaacacgatgcgcttcaagcgccaagctcgccgcttcaggaacaccatgtggtggaggaacgtcaagctcacagctgcagtgatattcatcctccccgtaattgtgtacgtcctgctcgcctacatgtgtcgcggcttcaccataccgtcatgctttccgtaatctccatccgtcccggtgccagtgcggacccccagccctagctctagctgcatcacaacttggttttccgggttctgtaacagcagcagcggtgctgcagttcttttttttttgtacgagggaaaca

SEQ ID NO: 1267 - protein, 226 aa, Zea mays
  misc_feature: Ceres Clone ID no. 100736041
  misc_feature (1)..(226): Bit score of 539.7 for hmm based on sequences of FIGURE 13.
  misc_feature (129)..(217): Pfam Name: Synaptobrevin Pfam Description: Synaptobrevin
  misc_feature: Functional Homolog Of SEQ ID NO. 160
MGKIEYGVVARGAVVLAEHYGAAAAGGNAGAVARQVLERLPGGGDDDCNVSYTQDLHVFHVKRTDGLTALCMADDAAGRRVPFAFLEDIHGRFVKAYGRAALTALAYAMNDEFSRVLAQQMDYYSNDASADRINRMRGEMDQVRSVMMDNIDRVLERGDRLEVLVDKTATMQGNTMRFKRQARRFRNTMWWRNVKLTAAVIFILPVIVYVLLAYMCRGFTIPSCFP

SEQ ID NO: 1268 - DNA, 740 bp, Zea mays
  misc_feature: Ceres Clone ID no. 100932667
  misc_feature: Encodes the peptide sequence at SEQ ID NO. 1269
ccgcggcgccgctccgctcgaaatccccaaaaaggcaagatcaaatcaaatcagatctctccacccccagcccatccatggcgatcgtgtacgccctggtcgcgcggggcacggtggtgctggccgagttcgccgccgtctcgggcaacgccggcgccgtggcccgtcggatcctcgagaagctgccgcccgacgccgagtccaggctgtgcttcgcgcaggaccggtacatcttccacgtcctccgatccgacgccgccggcatcaccttcctctgtatggccaacgacaccttcggaagaaggatcccctttctctacctggaggacatccaaatgaggttcatgaaaaactacggcagagtcgcccactctgcgctggcttacgccatgaacgatgagttctccagagtgctccatcagcaaatggagttcttctccagcaacccaagcgccgacacactcaaccgtctccgtggagaagtcagcgagatacacaccgtcatggtcgacaacatagagaaaattcttgacagaggcgatcgcatctcgctccttgtcgacaagacatccaccatgcaagacagcgcctttcacttccgcaagcaatccaagaggctccgtagagctctttggatgaagaatgccaagcttctagttgtgttgacagttgtcatagtagtgctgctctacttgatcatttctgctttctgtggaggcctttccttgtcatcatgcaga

SEQ ID NO: 1269 - protein, 221 aa, Zea mays
  misc_feature: Ceres Clone ID no. 100932667
  misc_feature (1)..(221): Bit score of 580.4 for hmm based on sequences of FIGURE 13.
  misc_feature (125)..(213): Pfam Name: Synaptobrevin Pfam Description: Synaptobrevin
  misc_feature: Functional Homolog Of SEQ ID NO. 160
MAIVYALVARGTVVLAEFAAVSGNAGAVARRILEKLPPDAESRLCFAQDRYIFHVLRSDAAGITFLCMANDTFGRRIPFLYLEDIQMRFMKNYGRVAHSALAYAMNDEFSRVLHQQMEFFSSNPSADTLNRLRGEVSEIHTVMVDNIEKILDRGDRISLLVDKTSTMQDSAFHFRKQSKRLRRALWMKNAKLLVVLTVVIVVLLYLIISAFCGGLSLSSCR

SEQ ID NO: 1270 - DNA, 1134 bp, Zea mays
  misc_feature: Ceres Clone ID no. 228789
  misc_feature: Encodes the peptide sequence at SEQ ID NO. 1271
gtacccgaattccatttcttcctcccctttttcctttccacgccttcccaccactcccagaggacccagacagacccctttcccctccctcctcgaccactccgacgcccacagcgcctccggcgagctccacctctccaccggcggcagcgaggggcgaggggggctaatactgtaggcggaggaggaaccgagccgatggggcagcagtcgctgatctacgcgttcgtggcgcggggcaccgtggtgctggccgagtacaccgagttcaccggcaacttcaccaccatcgccgcccagtgcctgcagaagctccccgccagcaacaacaagttcacctacaactgcgacggccacaccttcaactacctcgtcgaggacggattcacgtactgtgtagttgctgttgaatcagtcgggcgacaaatccccatagctttcctggacagagttaaggaagacttcaccaaaaagtatggaggcgggaaagcagctactgctgcagcgaacagcttgaagagggagtttggaccaaagcttaaagagcacatgcagtactgtgtggaccaccctgaggaggttagcaagcttgctaaggtgaaggcccaagtctctgaagtcaaaggagttatgatggaaaacattgagaaggttcttgaccgtggtgagaagattgagctgctagttgacaaaactgaaaatctgcgttctcaggcacaggatttcagacagcagggcaccaacgtgcggcgaaagatgtggctccaaaacatgaagatcaagctgatcgtcctgggcatcatcatcgcgctgatcctcatcatcatcctgtcggtgtgccacggcttcaagtgcggcagcaagtgaggaggggggcgtgacttacagatggctggtgtgccctggcaccggcgaggagaaagaccatggggagttttgctctttttggtcgtcttgttgttgagtcctgcgctgattattcttggtgatcgtcagagggagttattcctgatgtcggtgttgattgctgttggttgggaagtgacggtgaaccgggggaaggggggagggggttgtgtcgtgtaattttggatgctactgttgtgcatgtatagcttgtctgctaccctgttc

SEQ ID NO: 1271 - protein, 222 aa, Zea mays
  misc_feature: Ceres Clone ID no. 228789
  misc_feature (1)..(222): Bit score of 180.2 for hmm based on sequences of FIGURE 13.
  misc_feature (127)..(215): Pfam Name: Synaptobrevin Pfam Description: Synaptobrevin
  misc_feature: Functional Homolog Of SEQ ID NO. 160
MGQQSLIYAFVARGTVVLAEYTEFTGNFTTIAAQCLQKLPASNNKFTYNCDGHTFNYLVEDGFTYCVVAVESVGRQIPIAFLDRVKEDFTKKYGGGKAATAAANSLKREFGPKLKEHMQYCVDHPEEVSKLAKVKAQVSEVKGVMMENIEKVLDRGEKIELLVDKTENLRSQAQDFRQQGTNVRRKMWLQNMKIKLIVLGIIIALILIIILSVCHGFKCGSK

SEQ ID NO: 1272 - DNA, 1136 bp, Zea mays
  misc_feature: Ceres Clone ID no. 246664
  misc_feature: Encodes the peptide sequence at SEQ ID NO. 1273
attacccctcctcccactccacggagaagcgaaaccgacctttccccctcccccgcattccacctcgcggagatccagtccagccctagggtttcgccagcggcgagccaaactccacgagcgggggaagaggggaaagcagggacgacgagggggcagccatggggcagcagtcgctgatctacgcgttcgtggcccgtggcacggtcatactggccgagtacacggagttcaccggcaacttcaccaccatcgcctcccagtgcctcatgaagctccccgcaagcaacaacaagttcacctacaactgcgacggtcacactttcaattacctcgtggaagacggattcacatactgtgttgttgctgttgaatcggtggggcaacaaattcctattgctttcatggatagggttaaggaggatttcacaaaaaggtatggtggtgggaaagctgctactgctgcagctaacagcctcaatcgagagtttggatcaaaacttaaagaacacatgcagtattgtgtggatcaccctgaagaggttagcaagctggccaaagtgaaggcgcaggtttcagaagtcaagggtgttatgatggaaaacattgaaaaggttctggatcgtggagagaagattgagctgcttgtcgacaagaccgagaatcttcgctcacaggcacaagatttcagacagcagggaacaaatgtcaggagaaagatgtggttacagaacatgaaaatcaagctcatcgtcctgggaataatcatcgcactcattctgatcattatcctctctgtctgtcatggtttcaaatgccattaagcacagaccagaatactgatacattcaactgcacctattatactgctgcttggagcaaaaaaaagtatgatcttttgttgtttcgctagtgtgctgtggcccggtcattatgcataggtgttttacattgtcgtagtgtttgataaatgatggatggtgactgggtttgttgtgtcaactgtcataactattgtgcatttttggacgctatatgtgtagccttgatatgaatagatttactgtacttataagggctggtgtgactcagccgtttgctcctttgggcaatgtgcgcatttgggagcatcttgc

SEQ ID NO: 1273 - protein, 220 aa, Zea mays
  misc_feature: Ceres Clone ID no. 246664
  misc_feature (1)..(220): Bit score of 173.2 for hmm based on sequences of FIGURE 13.
  misc_feature (127)..(215): Pfam Name: Synaptobrevin Pfam Description: Synaptobrevin
  misc_feature: Functional Homolog Of SEQ ID NO. 160
MGQQSLIYAFVARGTVILAEYTEFTGNFTTIASQCLMKLPASNNKFTYNCDGHTFNYLVEDGFTYCVVAVESVGQQIPIAFMDRVKEDFTKRYGGGKAATAAANSLNREFGSKLKEHMQYCVDHPEEVSKLAKVKAQVSEVKGVMMENIEKVLDRGEKIELLVDKTENLRSQAQDFRQQGTNVRRKMWLQNMKIKLIVLGIIIALILIIILSVCHGFKCH

SEQ ID NO: 1274 - protein, 220 aa, Zea mays; identical to SEQ ID NO: 1273
  misc_feature: Public GI ID no. 194699710
  misc_feature (1)..(220): Bit score of 173.2 for hmm based on sequences of FIGURE 13.
  misc_feature (127)..(215): Pfam Name: Synaptobrevin Pfam Description: Synaptobrevin
  misc_feature: Functional Homolog Of SEQ ID NO. 160

SEQ ID NO: 1275 - DNA, 789 bp, Zea mays
  misc_feature: Ceres Clone ID no. 101142725
  misc_feature: Encodes the peptide sequence at SEQ ID NO. 1276
  misc_feature (17)..(17): n is a, c, t, g, unknown, or other
cccacgccgtccggggnaaagcagagacgacgagggggcagccatggggcagcagtcgctgatctacgcgttcgtggcccgtggcacggtcatactggccgagtacacggagttcaccggcaacttcaccaccatcgcctcccagtgcctcatgaagctccccgcaagcaacaacaagttcacctacaactgcgacggtcacactttcaattacctcgtggaagacggattcacatactgtgttgttgctgttgaatcggtggggcaacaaattcctattgctttcatggatagggttaaggaggatttcacaaaaaggtatggtggtgtgaaagctgctactgctgcagctaacagcctcaatcgagagtttggatcaaaacttaaagaacacatgcagtattgtgtggatcaccctgaagaggttagcaagctggccaaagtgaaggcgcaggtttcagaagtcaagggtgttatgatggaaaacattgaaaaggttctggatcgtggagagaagattgagctgcttgtcgacaagaccgagaatcttcgctcacaggcacaagatttcagacagcagggaacaaatgtcaggagaaagatgtggttacagaacatgaaaatcaagctcatcgtcctgggaataatcatcgcactcattctgatcattatcctctctgtctgtcatggtttcaaatgccattaagcacagaccagaatactgatacattcaactgcaccctattatactgctgcttggagcaaaaaagtatgatctttttgtgtttc

SEQ ID NO: 1276 - protein, 220 aa, Zea mays
  misc_feature: Ceres Clone ID no. 101142725
  misc_feature (1)..(220): Bit score of 176.1 for hmm based on sequences of FIGURE 13.
  misc_feature (127)..(215): Pfam Name: Synaptobrevin Pfam Description: Synaptobrevin
  misc_feature: Functional Homolog Of SEQ ID NO. 160
MGQQSLIYAFVARGTVILAEYTEFTGNFTTIASQCLMKLPASNNKFTYNCDGHTFNYLVEDGFTYCVVAVESVGQQIPIAFMDRVKEDFTKRYGGVKAATAAANSLNREFGSKLKEHMQYCVDHPEEVSKLAKVKAQVSEVKGVMMENIEKVLDRGEKIELLVDKTENLRSQAQDFRQQGTNVRRKMWLQNMKIKLIVLGIIIALILIIILSVCHGFKCH

SEQ ID NO: 1277 - protein, 221 aa, Vitis vinifera
  misc_feature: Public GI ID no. 157336295
  misc_feature (1)..(221): Bit score of 138.3 for hmm based on sequences of FIGURE 13.
  misc_feature (127)..(215): Pfam Name: Synaptobrevin Pfam Description: Synaptobrevin
  misc_feature: Functional Homolog Of SEQ ID NO. 160
MSQESFIYSFVARGTMVLAEYTEFTGNFPAIATQCLQRLPSANNKFTYNCDHHTFNFLVEDGYAYCVVAKESVGKQVSIAFLERMKADFKKRYGGGKADTATAKSLNKDFGPIMKEHMQYIIDHAEEIEKLLKVKAQVSEVKSIMLENIDKTLERGENLTILADKTEDLRSQAQQFKKQGSQVRRKMWFQNMKIKLVVLGILLILALVIWVSICHGFNCSK

SEQ ID NO: 1278 - DNA, 945 bp, Panicum virgatum
  misc_feature: Ceres Clone ID no. 1768420
  misc_feature: Encodes the peptide sequence at SEQ ID NO. 1279
acacggcagacgagaggaggcgaggccggccaccccggggggaggagtggcgggcgcggggatggcgatccagtacgcgctggtggcgcgcggcacggtggtgctggcggagcacagcgccgcggccaccaacgcgggcgccgtcacgcgccaggtcctcgagcgcctccccggcggcggcgccgacagccacgtctcctacacgcaggaccgctacgtcttccacgccaagcgcaccgacggcatcaccgcgctctgcatggccgacgacgccgccgggagacggataccctttgcatttttggaagacattcatggaagatttgtcaaaacatatggccgcgctgcgctgactgctcttgcgtatgcaatgaatgatgaattctcaagggttcttagccagcaaatggactactattcaaatgaccctaacgcagatagaataaaccgcatgagaggtgaaatcaatcaggttcgtagtgttatgattgataacattgacaaagtccttgaaagaggtgaccgtttggagctgctggttgacaagaccgcaaatatgcaaggaaatactgttcgattcagaagacaagctcggcgcttcagaaacaccgtttggtggagaaatgtcaaactcacggctgcgttgatacttctccttctggtaatagtatatgttgcgcttgtcttcgtgtgccatggtttcaccttaccaacttgtatacgctagggtatggtgtgcctgtttgtgtgattatgtctccattccttgggagcagctatcgcagtactgttgcagttggttttgatgtagaggaaagctccagattgtggtgtaatagtgatggtgtcaattgtgaaaaactcaattaaagatgtaaacttcacataagactgcatctcgcagggtcttgctatggcgtagctgcgcgcgcctgggttgtgttc

SEQ ID NO: 1279 - protein, 221 aa, Panicum virgatum
  misc_feature: Ceres Clone ID no. 1768420
  misc_feature (1)..(221): Bit score of 645.3 for hmm based on sequences of FIGURE 13.
  misc_feature (124)..(212): Pfam Name: Synaptobrevin Pfam Description: Synaptobrevin
  misc_feature: Functional Homolog Of SEQ ID NO. 160
MAIQYALVARGTVVLAEHSAAATNAGAVTRQVLERLPGGGADSHVSYTQDRYVFHAKRTDGITALCMADDAAGRRIPFAFLEDIHGRFVKTYGRAALTALAYAMNDEFSRVLSQQMDYYSNDPNADRINRMRGEINQVRSVMIDNIDKVLERGDRLELLVDKTANMQGNTVRFRRQARRFRNTVWWRNVKLTAALILLLLVIVYVALVFVCHGFTLPTCIR

SEQ ID NO: 1280 - DNA, 680 bp, Panicum virgatum
  misc_feature: Ceres Clone ID no. 1829174
  misc_feature: Encodes the peptide sequence at SEQ ID NO. 1281
aaatccaaatctatctgatcagatctctccgacccccatccccatggcgatcgtgtacgcgctggtggcgcgcggcaccgtcgtgctggccgagttcgccgccgtctcgggcaacgccggcgccgtcgcccgccgcatcctcgagaagctgccgcccgacgccgactcccgcctctgcttcgcgcaggaccgctacatcttccacgtcctccgcgccgacgccggcatcaccttcctctgcatggccaacgacaccttcggaaggaggatcccctttctctacctggaggatatccagatgaggttcatgaagaactacggcagagtcgcgcactccgcgctcgcctatgccatgaacgatgagttctccagggtcctccaccaccaaatggagttcttctccagcaaccccagcgccgacacgctcaaccgtctccgtggagaagtcagcgagatacacaccgttatggtcgacaacatagagaaaattctagacagaggtgaccgcatctcactccttgtcgacaagacatccaccatgcaagacagcgctttccacttccgcaagcaatccaagaggctccgcagagcgctttggatgaagaatgccaagcttctagctgtgttgacggttgccatagtagtgctactctacttgctcatttctgctttctgtggag

SEQ ID NO: 1281 - protein, 212 aa, Panicum virgatum
  misc_feature: Ceres Clone ID no. 1829174
  misc_feature (1)..(212): Bit score of 557.8 for hmm based on sequences of FIGURE 13.
  misc_feature (124)..(212): Pfam Name: Synaptobrevin Pfam Description: Synaptobrevin
  misc_feature: Functional Homolog Of SEQ ID NO. 160
MAIVYALVARGTVVLAEFAAVSGNAGAVARRILEKLPPDADSRLCFAQDRYIFHVLRADAGITFLCMANDTFGRRIPFLYLEDIQMRFMKNYGRVAHSALAYAMNDEFSRVLHHQMEFFSSNPSADTLNRLRGEVSEIHTVMVDNIEKILDRGDRISLLVDKTSTMQDSAFHFRKQSKRLRRALWMKNAKLLAVLTVAIVVLLYLLISAFCG

SEQ ID NO: 1282 - DNA, 744 bp, Panicum virgatum
  misc_feature: Ceres Clone ID no. 1865925
  misc_feature: Encodes the peptide sequence at SEQ ID NO. 1283
tccttgcccccctcatccacccacttccggcgagctctacaccggcggcagcggaggagcgtgggggctgatcctagggggcgaaggagcagcggagcggagacgaagcgatggggcagcagcagctgatctacgcgttcgtggcgcggggcacggtggtgctggccgagtacaccgagttcaccggcaacttcaccaccatcgccgcccagtgcctgcagaagctccccgccagcaacaacaagttcacatacaactgcgacggccacaccttcaactacctcgtcgaggacggattcacgtactgtgtggttgctgttgagtcagttggccgacaaatccccataggtttcctggacagagttaaggaagacttcacgaaaaaatatggtggtggaaaagcagctactgcagcagcaaacagcttgaacagggagtttggatcaaaacttaaggagcacatgcagtactgtgtggaccacccagaggaggtcagcaagcttgccaaggtgaaagcccaagtctcagaagtcaaaggagttatgatggagaatattgagaaggttctggaccgtggggagaagattgagctgcttgttgacaagactgaaaatctgcgttctcaggcacaagatttcaggcagcagggcacccaggtgcggcgaaagatgtggctgcagaacatgaagatcaagctgatcgtcctgggcattatcattgcgctcatccttatcatcatcctgt

SEQ ID NO: 1283 - protein, 211 aa, Panicum virgatum
  misc_feature: Ceres Clone ID no. 1865925
  misc_feature (1)..(211): Bit score of 153.2 for hmm based on sequences of FIGURE 13.
  misc_feature (127)..(211): Pfam Name: Synaptobrevin Pfam Description: Synaptobrevin
  misc_feature: Functional Homolog Of SEQ ID NO. 160
MGQQQLIYAFVARGTVVLAEYTEFTGNFTTIAAQCLQKLPASNNKFTYNCDGHTFNYLVEDGFTYCVVAVESVGRQIPIGFLDRVKEDFTKKYGGGKAATAAANSLNREFGSKLKEHMQYCVDHPEEVSKLAKVKAQVSEVKGVMMENIEKVLDRGEKIELLVDKTENLRSQAQDFRQQGTQVRRKMWLQNMKIKLIVLGIIIALILIIIL

SEQ ID NO: 1284 - DNA, 1135 bp, Panicum virgatum
  misc_feature: Ceres Clone ID no. 1956654
  misc_feature: Encodes the peptide sequence at SEQ ID NO. 1285
agattccatcgaatccttccttctaactctccaccgcgggaaggaaggagggagacgaagcagaagcttctcgcagggccttcccgttcggcggcgtttgtggcggggcgactccgggcgccatgagcagcagcaagcaggcgctgatttacagcttcgtcgccaagggctccgtcgtgctggcggagcacaccgccttctccggcaacttcagcaccgtcgccgtccagtgcctccagaagctgccccccaacagcaccagatccacctactcctgcgatggccacaccttcaacttcctcgtcgaccgcggcttcgtgttcctagtggtcgcggatgaggcggccgggaggagcgttcccttcgtcttcctagagagggttagggaagacttcatgcagcggtatgggtccagcatcgacgaggaggggcagcacccgctcgctgatgatgcggacgaagatgactttctgttcgaagaccgcttcagcattgcctacaaccttgaccgtgaattcggcccgaggttaaaggatcatatgcagtattgtgttaaccmcccagaggaaattaacaagctctccaaggtgaaggcccacctgtcagaagtcaaagggatcatgatggataatattgagaagatattggaccgtggtgagaagattgagcttttggtggggaagactgagaccttgcaatcacaggctgacaccttccacaggcatggcagagagctgaggcgaaagatgtggcttcagaacctaaggttcaagctgatggttggtggaggcattgcagctctgattctcatcctttggctgatggtctgcaggggattcaaatgttagatcgctcgaaatcattgctcgccctctcactttttttttaaaaaaaagaagtgtttgtgttgttgaccgtttcacatgcacagaatggtcaccgaatcatgtttcagtcatgctgtgggtattggtatcgcttagcagatgttaattctgtgcggtccttgccgtgtttcatatgataatggtaggcagctatagtacctgtgatagataactttgtgggagaaggggatatgacactatgacctttattgtctgtacattctgaaatgcaaactcttattatttgg

SEQ ID NO: 1285 - protein, 241 aa, Panicum virgatum
  misc_feature: Ceres Clone ID no. 1956654
  misc_feature (1)..(241): Bit score of 145.4 for hmm based on sequences of FIGURE 13.
  misc_feature (149)..(237): Pfam Name: Synaptobrevin Pfam Description: Synaptobrevin
  misc_feature: Functional Homolog Of SEQ ID NO. 160
  misc_feature (146)..(146): Xaa is any aa, unknown, or other
MSSSKQALIYSFVAKGSVVLAEHTAFSGNFSTVAVQCLQKLPPNSTRSTYSCDGHTFNFLVDRGFVFLVVADEAAGRSVPFVFLERVREDFMQRYGSSIDEEGQHPLADDADEDDFLFEDRFSIAYNLDREFGPRLKDHMQYCVNXPEEINKLSKVKAHLSEVKGIMMDNIEKILDRGEKIELLVGKTETLQSQADTFHRHGRELRRKMWLQNLRFKLMVGGGIAALILILWLMVCRGFKC

SEQ ID NO: 1286 - protein, 220 aa, Elaeis guineensis
  misc_feature: Public GI ID no. 192910812
  misc_feature (1)..(220): Bit score of 182.1 for hmm based on sequences of FIGURE 13.
  misc_feature (127)..(215): Pfam Name: Synaptobrevin Pfam Description: Synaptobrevin
  misc_feature: Functional Homolog Of SEQ ID NO. 160
MGQQTLIYSFVARGTVILAEYTEFTGNFTSIASQCLQKLPSSNNKFTYNCDSHTFNYLVEDGFTYCVVAVESAGRQIPIAFLERVKEDFKKRYGGGKAATASANSLNREFGPKLKEHMQYCVDHPEEISKLSKVKAQVSEVKGVMMENIEKVLERGEKIELLVDKTENLRSQAQDFRQQGTKMRRKMWLQNMKIKLIVLGIIIALILIIILSVCHGFKCT

SEQ ID NO: 1287 - protein, 220 aa, Physcomitrella patens subsp. patens
  misc_feature: Public GI ID no. 168019158
  misc_feature (1)..(220): Bit score of 542.8 for hmm based on sequences of FIGURE 13.
  misc_feature (123)..(211): Pfam Name: Synaptobrevin Pfam Description: Synaptobrevin
  misc_feature: Functional Homolog Of SEQ ID NO. 160
MAILYALVARGTVVLAEFSAASGNASTIARRILEKLPPGGDSRVSYSQDRHIFHILKADGLTFLCMATDSFGRRIPFAYLEDIHMRFMKNYGKVASTALAYTMNDEFSRVLHQQMEYFSTNKQADSINRVKGEIVEVRAVMVENIDKVLERGDRIELLVDKTATIQDNTFRFKKQSRRLRQAMWIKNAKLLATLTCLIIVLLYIIISFFCGGIFLRSCRG

SEQ ID NO: 1288 - protein, 215 aa, Ostreococcus lucimarinus CCE9901
  misc_feature: Public GI ID no. 145347629
  misc_feature (1)..(215): Bit score of 162.8 for hmm based on sequences of FIGURE 13.
  misc_feature (123)..(211): Pfam Name: Synaptobrevin Pfam Description: Synaptobrevin
  misc_feature: Functional Homolog Of SEQ ID NO. 160
MPLIYAFVARRTTVLAEFTNYSGNFSTIAIQALEKLSDDNTRFTYTADGHTFNYVVENGFTYLVVADSELGRHVPFACLDRIKSEFTRDHASEAQDAIAHSLNKSFAPRLKEHLEFCSANPEAVSKVSAVQQQVSQVKEIMMDNIEKVLDRGEKIELLVDKSDALRFEAANFHKTGRALRRNLWCQNMKIKVAFGLIIFALLLTLIFTLCGKKCR

SEQ ID NO: 1289 - DNA, 940 bp, Gossypium hirsutum
  misc_feature: Ceres Clone ID no. 1918584
  misc_feature: Encodes the peptide sequence at SEQ ID NO. 1290
cgcactgttttaataaaaatcctcctcaacttccccaactccaactccattacttcagatctgaattcccaaatatatttgcacaatccagagcagagtaatggggatattgtacgggatggtagcaagggggcaggtggtgttggccgagttcagcgcaactcagactaatgccattgccagcgttgtagccaggctgatactggagaagatgaaagaagtgaagaataatagtatttcatcgttttcacatcatccttatatttttcatgtcaagggaaccgatggtctcaccgttctttgcatggccgatgatgcctccggaaggataatcccttccgctttccttgaagatatccataaaaaatttgtaaagacatttggtcgtgctgttcattcggcttcagcttatgctatgaatgatgaattctccagggttctatgtcaacaaatagatcatttctcaagaaacccaaatgttgatagattaaaccgtttaaaaggggagatgaaccaggtacagagtgtattgattgacaatattgagaaagccttggagagaggcgaccgcttggcgcttcttgttgaaaaggctataacaatgcagtagcctatgcaggggaataatagtacagttgcgctcaaaaggaaagctcgtagttacaaaaatgctatgtggtggagagattggcgacattgatgctgttgtttttgctgaccatcgtttatgtttcgctcgcatttgtttgtaatggcctctttttatcgtcctgcttcaatcatatgacaatggcttccgtggttcctcacatgttttatgagtagctgttagctgtaatccctaaatgcctgtaatgatacaattcgtttagaaatgtatgcataagctgcaattcaaagaatattacaagaagatataaaaagagtgtcctttacattt

SEQ ID NO: 1290 - protein, 169 aa, Gossypium hirsutum
  misc_feature: Ceres Clone ID no. 1918584
  misc_feature (1)..(169): Bit score of 270.9 for hmm based on sequences of FIGURE 13.
  misc_feature (126)..(169): Pfam Name: Synaptobrevin Pfam Description: Synaptobrevin
  misc_feature: Functional Homolog Of SEQ ID NO. 160
MGILYGMVARGQVVLAEFSATQTNAIASVVARLILEKMKEVKNNSISSFSHHPYIFHVKGTDGLTVLCMADDASGRIIPSAFLEDIHKKFVKTFGRAVHSASAYAMNDEFSRVLCQQIDHFSRNPNVDRLNRLKGEMNQVQSVLIDNIEKALERGDRLALLVEKAITMQ

SEQ ID NO: 1291 - DNA, 1067 bp, Gossypium hirsutum
  misc_feature: Ceres Clone ID no. 1850218
  misc_feature: Encodes the peptide sequence at SEQ ID NO. 1292
ccccttctctctctccatccttaaagaacacaatatttccctcatagagagcatgttgaggattggattcagaaacatcattaatggcttcatatgtagagcctcacttcctcagtgcttttataacagggaattatcgacacaaactggaaggctgaaaggcaaaatagcattgatcactggggcagcaagcggtatcgggaaggcagctgcagcgaaattcatcagtaatggtgccaaagtcgtcattgctgatatacaacaccaactagggcaagcaacggcgaatgagcttggacccaatgctacttttataccctgtgacgtaacggaagaatcagatgtatccgatgctgttgactttaccgtctccaaacacaaacgactggatgttatgtacaataatgctggggtaccttgctacacgcctccgagcattgtggaccttgaccttgccattttcgacagagttatgggcatcaatgtgcgaggagtcttggccggcatcaaacacgcttcgcgtgtgatgatccctagtagaactggctccattctgtgcacagctagcgtaactggaatgatgggtggactagctcaacatacttacagtgtgtccaagtctgctgtcataggaattgttaagtccatggcagctgagctatgccagtacggaatccgtgtcaactgcatatcaccttttgcagttccgactccatttacactagatgagatgagccagatttatccacaaattgatgccgagcagctcgtcaaaatgatacatagttttggtgtgctcggcaaagcaacattggaaccaggtgatgtagccgatgccgcagtctatcttgcatcagatgatgcaaagtatgttagtgggcataatttggtggtagatggaggttttacatcatttaagagattggaacttcctaagagctaaagtcttataaatgctgctcaaaggatatattttggaaattgaagtacgaggtatatttcaagtttcttctagtttttgacagtctggggaacaacaattagactaaacacaaatgaatttcagt

SEQ ID NO: 1292 - protein, 296 aa, Gossypium hirsutum
  misc_feature: Ceres Clone ID no. 1850218
  misc_feature (1)..(296): Bit score of 381.7 for hmm based on sequences of FIGURE 8.
  misc_feature (38)..(204): Pfam Name: adh_short Pfam Description: short chain dehydrogenase
  misc_feature: Functional Homolog Of SEQ ID NO. 1012
MLRIGFRNIINGFICRASLPQCFYNRELSTQTGRLKGKIALITGAASGIGKAAAAKFISNGAKVVIADIQHQLGQATANELGPNATFIPCDVTEESDVSDAVDFTVSKHKRLDVMYNNAGVPCYTPPSIVDLDLAIFDRVMGINVRGVLAGIKHASRVMIPSRTGSILCTASVTGMMGGLAQHTYSVSKSAVIGIVKSMAAELCQYGIRVNCISPFAVPTPFTLDEMSQIYPQIDAEQLVKMIHSFGVLGKATLEPGDVADAAVYLASDDAKYVSGHNLVVDGGFTSFKRLELPKS

SEQ ID NO: 1293 - protein, 352 aa, Vitis vinifera
  misc_feature: Public GI ID no. 157336541
  misc_feature (1)..(352): Bit score of 364.5 for hmm based on sequences of FIGURE 11.
  misc_feature (36)..(203): Pfam Name: HSF_DNA-bind Pfam Description: HSF-type DNA-binding
  misc_feature: Functional Homolog Of SEQ ID NO. 364
MNPPVRGSSSSYPDEPLIAASQRPQPMEGLHDIGPPPFLNKTYDLVDDPSTDSIVSWSIGNNSFVVWDPQIFAGNLLPRYFKHNNFSSFVRQLNTYGFRKVDPDRWEFANEEFLRGQKPLLKKIKRKKALQPYTSQQAVGPSVEVERFGLDGEVDHRRRDKEVLMMELVKLRRQQQDTRAYLQAMEQRIKGTELKLKQMMNFWAKVIKNPSIIQKLVQQSRTKELESALTKKRRLIDEVPTYVEAPGEGTSVKIEPHDYDDISAFEVSELDTLAMDMEGLSKTGKKPGNEQIEKEEMKLESGNKALDIGIWEEFLNEELEGDMGLLGTVGGDDEEDVNVLVDQLCDLVSSPV

SEQ ID NO: 1294 - protein, 358 aa, Vitis vinifera
  misc_feature: Public GI ID no. 157335907
  misc_feature (1)..(358): Bit score of 638.0 for hmm based on sequences of FIGURE 9.
  misc_feature (117)..(350): Pfam Name: Trehalose_PPase Pfam Description: Trehalose-phosphatase
  misc_feature: Functional Homolog Of SEQ ID NO. 1129
MTNQNVAVSDPKSAIGMAIDVIVSNSSFFSPAVRKPPTVPGGYITISLKKLETGGAGGAGRVGAWVDSMRASSPTHIKSTPLSDSEALSSWMLHHPSALRTFEQITNASEGKQIVMFLDYDGTLSPIVEDPDQAFMSKEMRAAVKDVARYFPTAIVSGRCRDKVYRFVKLSELYYAGSHGMDIKGPAKGRKYKKGDQSLLCQPASEFLPMIDEVYKALLEKTKSTPGAKVENNKFCLSVHFRCVDEQRWTALAEQVRLVLNQYPKLRLTQGRKVLEIRPTIKWDKGNALEFLLESLGYANSNDVFPIYIGDDRTDEDAFKVLRNRGQGFGILVSKFPKETSASYSLQEPTEARTLIWT

SEQ ID NO: 1295 - DNA, 1135 bp, Zea mays
  misc_feature: Ceres Clone ID no. 100861292
  misc_feature: Encodes the peptide sequence at SEQ ID NO. 1296
ccctcgtctccgcacagagagggctcctcgctgccgtgtgccgggcttcactttcccctctcgtctcctctcccatggctcagcgcgacaagaaggtggaggagccgacggagctgcgcgcgccggagctcacgctgtgcgccaacagctgcggcttcccgggcaacccggccaccaacaacctctgccaggcctgcttcctggccgccacggcttcctcctccgcctccgcctccgtctcgccgccgccgccctcctcctcctcctcgtcgccggcggtgctccagttcgacgagcagcagcagcagcaaaatccgaggccgcgtgcgccggcggcgtccgggcccacggaggaaccgcccaggccggcccgggcgtcagctccggctccggctccggcgtcgtcctcgtccgtccgccggtgccagacctgccgcaagcgggtggggctcacgggcttccgctgccgctgcggagacctcttctgcggcgcgcaccgctactcggaccgccacgactgctgcttcgactacagggccgccggccgcgacgccatcgccagggacaaccccgtcgtgcgcgccgccaagatcgttaggttctaggcgtctcggatccggccggaggagctagctagctagctaggggcgggcacacacacgcacmcgcggtgatgggcgccgagatccgtcgccggtcctcatcgccctctatagtccgtccccccttcctctcctcctctccctctttgattgtcctctcctttttttcttgctgtcatctatttttattgcgagggggaaaaatgatttgatggtcaccgatcgatccgtccttggagggtgttggttatgtgttgatcgccatgctgttttagaaaattattccgtttacgaggacgacgatcgacgagaagcgtcgaaaaagagaggggggagagaatgaagacgaaaagaatagtgcgatgataacgttgttgttgttgtttgtagcggtggtggtggtggctggtggaagcgatatggttcggttcggttcggtgtgctcttgtcctgctgggaatcacaaattcctgttgaattttttttatatatctttgtataaaacgaaattgaaaatgtttatatggtgtgcc

SEQ ID NO: 1296 - protein, 176 aa, Zea mays
  misc_feature: Ceres Clone ID no. 100861292
  misc_feature (1)..(176): Bit score of 345.8 for hmm based on sequences of FIGURE 15.
  misc_feature (117)..(157): Pfam Name: zf-AN1 Pfam Description: AN1-like Zinc finger
  misc_feature (19)..(43): Pfam Name: zf-A20 Pfam Description: A20-like Zinc finger
  misc_feature: Functional Homolog Of SEQ ID NO. 749
MAQRDKKVEEPTELRAPELTLCANSCGFPGNPATNNLCQACFLAATASSSASASVSPPPPSSSSSSPAVLQFDEQQQQQNPRPRAPAASGPTEEPPRPARASAPAPAPASSSSVRRCQTCRKRVGLTGFRCRCGDLFCGAHRYSDRHDCCFDYRAAGRDAIARDNPVVRAAKIVRF

SEQ ID NO: 1297 - DNA, 731 bp, Panicum virgatum
  misc_feature: Ceres Clone ID no. 1875452
  misc_feature: Encodes the peptide sequence at SEQ ID NO. 1298
aaacccatttccttcctgcctccacgacccagcccaggcccggcggtgcctctccctctcgtctccggatcggcaagagcccagctgctgccggattcacacgacacctcgtcgtctctctctctctctctctctctctctctctctctctcggcccatggcgcagcgcgacaagaaggtggaggagccgacggagctgcacgcgccggagctcacgctctgcgccaacagctgcggcttcccgggcaacccggcgaccaagaacctctgccagaactgcttcctggccgcctcggcctccgtgtcgccgccgtcgccctcctcctcctcgtcgccctcgccggcggtgttcgacaagccgcggccggcggccgcccctcccgccgtgtggccgccgttccccgcggccgccgaccggcccccggcgggccccgcggagtccccctccaaggcgccccggacgtcgtcgtcggtcaaccggtgccacagctgccagaagcgggtcgggctgacggggttccggtgccgctgcggcgagctcttctgcggcgcgcaccggtactcggaccgccacgactgcggctacgactacaagggcgtcgcccgggacgccatcgcccgggagaaccccgtcgtgcgcgccgccaagatcgtcaggttctgagagctggggagcaccggaggagaccacgcagctcagctccacgccgatcgtcgatccatctcccgcg

SEQ ID NO: 1298 - protein, 168 aa, Panicum virgatum
  misc_feature: Ceres Clone ID no. 1875452
  misc_feature (1)..(168): Bit score of 339.7 for hmm based on sequences of FIGURE 15.
  misc_feature (109)..(149): Pfam Name: zf-AN1 Pfam Description: AN1-like Zinc finger
  misc_feature (19)..(43): Pfam Name: zf-A20 Pfam Description: A20-like Zinc finger
  misc_feature: Functional Homolog Of SEQ ID NO. 749
MAQRDKKVEEPTELHAPELTLCANSCGFPGNPATKNLCQNCFLAASASVSPPSPSSSSSPSPAVFDKPRPAAAPPAVWPPFPAAADRPPAGPAESPSKAPRTSSSVNRCHSCQKRVGLTGFRCRCGELFCGAHRYSDRHDCGYDYKGVARDAIARENPVVRAAKIVRF

SEQ ID NO: 1299 - DNA, 829 bp, Zea mays
  misc_feature: Ceres Clone ID no. 296366
  misc_feature: Encodes the peptide sequence at SEQ ID NO. 1300
gctcaggccagccgtgcggtagcttctccccccctcgtctccgcacagagagggctcctcgctgccgtgtgccggccttcactttcccctctcgtctcctctcctctcccatggctcagcgcgacaagaaggtggaggagccgacggagctgcgcgcgccggagctcacgctgtgcgccaacagctgcggcttcccgggcaacccggccaccaacaacctctgccaggcctgcttcctggccgccacggcttcctcctccgcctccgtctcgccgccgccgccctcctcctcctcgtctccggcggtgctccagttcgacgaccagcagcaaaatccgaggccgtgtgcgccggcggcgtccgggcccacggaggaaccgcccaggccggcccgggcgtcagcgccggcgtcgtcctcgtccgtccgccggtgccagacctgccgcaagcgggtggggctcacgggcttccgctgccgctgcggggacctcttctgcggcgcgcaccgctactcggaccgccacgactgctgcttcgactacagggccgccggccgcgacgccatcgccagggacaaccccgtcgtgcgcgccgccaagatcgttaggttctaggcgtctcggatccggccggaggagctagctagctagctaggggcgggcacacacacacacacacgcggtgatgggcgccgagatccgtcgccggtcctcatcgccctctatagtccgtcccccttcctctcctcctctccctctttgattgtcctctccttttcttctactgtcatctatttttattgcgagggggaaaaaatgatttgatggtc

SEQ ID NO: 1300 - protein, 167 aa, Zea mays
  misc_feature: Ceres Clone ID no. 296366
  misc_feature (1)..(167): Bit score of 339.6 for hmm based on sequences of FIGURE 15.
  misc_feature (108)..(148): Pfam Name: zf-AN1 Pfam Description: AN1-like Zinc finger
  misc_feature (19)..(43): Pfam Name: zf-A20 Pfam Description: A20-like Zinc finger
  misc_feature: Functional Homolog Of SEQ ID NO. 749
MAQRDKKVEEPTELRAPELTLCANSCGFPGNPATNNLCQACFLAATASSSASVSPPPPSSSSSPAVLQFDDQQQNPRPCAPAASGPTEEPPRPARASAPASSSSVRRCQTCRKRVGLTGFRCRCGDLFCGAHRYSDRHDCCFDYRAAGRDAIARDNPVVRAAKIVRF

SEQ ID NO: 1301 - DNA, 1111 bp, Panicum virgatum
  misc_feature: Ceres Clone ID no. 2015820
  misc_feature: Encodes the peptide sequence at SEQ ID NO. 1302
cccccaacccatttccttcctgcccgcaacccagcccaggcccggcggtccctcgatcctctcggctccggatcggcaagagcccagccgcagccgcccgtagccgcctcgctgccggattcacacgacgccttgtcggcgtctctctctctctcgaggcccatggcgcagcgcgacaagaaggtggaggagccgacggagctgcacgcgccggagctcacgctctgcgccaacagctgcggcttcccgggcaacccggccaccaagaacctctgccagaactgcttcctggccgcctccgcctccgtctcgccgccgtcgccctcctcctcctcgccggcggtgttcgacaagccgcggacggcggcggcggcggccgcccctcccgcgctctggccgccgttctccccggccgccaaccggcccccggcgggccccgcggagtccccctccaaggcgccccggacgtcgtcgtcgatcaaccggtgccacagctgccggaagcgggtcgggctgacggggttccggtgccgctgcggcgagctcttctgcggcgcgcaccggtactcggaccgccacgactgcggctacgactacaagggcgtcgcccgggacgccatcgcccgggagaaccccgtcgtgcgcgccgccaagatcgtcaggttctgagagagctggggagcaccggaggaccacgcacagctcagctccacgccgatcgtcgatccatcatctcccgcgctccggaatcccctctcttttttctctttttctttcctcttttgttacaaaatttaaaggtgattggtcgagctgtcatcacgctgttctcgagaatcccacaaacaagaagaagatgatttgattgatgaaggaaaaagaagaaggagcagatcatgggaaccatgaaggcagggaagctgcgagaaaaaggggatcgagagcacagtgcgatgataatgttgttgttgtagcggtggttggggtggaggggaagagatagagtcggtttggtgtgttgtcctactacaaatcacaatcttctattaaatttttcttccatctctctgtataaactaaattataattgggatctccctattgcccagct

SEQ ID NO: 1302 - protein, 168 aa, Panicum virgatum
  misc_feature: Ceres Clone ID no. 2015820
  misc_feature (1)..(168): Bit score of 323.5 for hmm based on sequences of FIGURE 15.
  misc_feature (109)..(149): Pfam Name: zf-AN1 Pfam Description: AN1-like Zinc finger
  misc_feature (19)..(43): Pfam Name: zf-A20 Pfam Description: A20-like Zinc finger
  misc_feature: Functional Homolog Of SEQ ID NO. 749
MAQRDKKVEEPTELHAPELTLCANSCGFPGNPATKNLCQNCFLAASASVSPPSPSSSSPAVFDKPRTAAAAAAPPALWPPFSPAANRPPAGPAESPSKAPRTSSSINRCHSCRKRVGLTGFRCRCGELFCGAHRYSDRHDCGYDYKGVARDAIARENPVVRAAKIVRF

SEQ ID NO: 1303 - DNA, 1114 bp, Panicum virgatum
  misc_feature: Ceres Clone ID no. 1724165
  misc_feature: Encodes the peptide sequence at SEQ ID NO. 1304
caacccatttccttcctgcccgcaaggccgcaacccagcccaggcccggcggtccctcgatcctctcggctccggatcggcaagagcccagccgccgccgcccgtagccgcctcgctgccggattcacacgacaccttgtcggcgtctctttctctctctcgaggcccatggcgcagcgcgacaagaaggttgaggagccgacggagctgcacgcgccggagctcacgctctgcgccaacagctgcggcttcccgggcaacccggccaccaagaacctctgccagaactgcttcctggccgcctccgcctccgtctcgccgccgtcgccctcctcctcgccggcggtgttcgacaagccgcggacggcggcggcggcggccgcccctcccgcgctctggccgccgttctccccggccgccaaccggcccccagcgggccccgcggagtccccctccaaggcgccccggacgtcgtcgtcggtcaaccggtgccacagctgccggaagcgggtcgggctgacggggttccggtgccgctgcggcgagctcttctgcggcgcgcaccggtactcggaccgccacgactgcggctacgactacaagggcgtcgcccgggacgccatcgcccgggagaaccccgtcgtgcgcgccgccaagatcgtcaggttctgagagagctggggagcaccggaggaccacgcacagctcagctccacgccgatcgtcgatccatcatctcccgcgctccggaatcccctctcttttttctctttttctttcctcttttgttacaaaatttaaaggtgattggtcgagggtgctgtcatcacgctgttctcgagaatcccacaaacaagaagaagatgatttgattgatgaaggaaaaagaagaaggagcagatcatgggagccatgaaggcagggaagctgcgagaaaaaggggatcgagagcacagtgcgatgataatgttgttgttgtagcggtggttggggtggaggggaagagatagggtcggtttggtgtgttgtcctactacaaatcacaatcttctattaaatttttcttccatctctctgtataaactaaattataattggaatctccctattgccc

SEQ ID NO: 1304 - protein, 167 aa, Panicum virgatum
  misc_feature: Ceres Clone ID no. 1724165
  misc_feature (1)..(167): Bit score of 322.7 for hmm based on sequences of FIGURE 15.
  misc_feature (108)..(148): Pfam Name: zf-AN1 Pfam Description: AN1-like Zinc finger
  misc_feature (19)..(43): Pfam Name: zf-A20 Pfam Description: A20-like Zinc finger
  misc_feature: Functional Homolog Of SEQ ID NO. 749
MAQRDKKVEEPTELHAPELTLCANSCGFPGNPATKNLCQNCFLAASASVSPPSPSSSPAVFDKPRTAAAAAAPPALWPPFSPAANRPPAGPAESPSKAPRTSSSVNRCHSCRKRVGLTGFRCRCGELFCGAHRYSDRHDCGYDYKGVARDAIARENPVVRAAKIVRF

SEQ ID NO: 1305 - DNA, 951 bp, Brassica napus
  misc_feature: Ceres Clone ID no. 1030374
  misc_feature: Encodes the peptide sequence at SEQ ID NO. 1306
gaaactcagaaaagcagagaactttattctctcctctaacctctcaacttctgctggatctctccagcagacggaagatcttcttcggagagattcttaggggaccgaacgatctatcgatcaaggcttctcgggcaaacagaagtgcagaaatggaccacgacaagacaggatgccaaagcccacccgagggtcccaagctatgcatcaacaactgcggtttcttcggaagcgctgccacaatgaacatgtgttccaagtgccacaagactatcttgtttcaacaggaacagggggccaagcttgcatctgcagtgtctggatcacccagcaacatcctaaaggaaaccttcactgctgatttggttgatgctggaaccaaatccatcgagcctgtggctgtctctgtacaagctgttgcagaggtagtagcaccagaagaagctgcagcaaaaccaaaggaagggcccagccgatgtactacttgcaacaaacgggttggtttgactggattcaaatgtcgatgtggtgacctcttctgtggtacgcaccgctatgcagacgttcataactgctctttcgattaccatgttgctgcgcaagaagctatagccaaagcgaacccggttgtgaaggcagataagcttgacaagatctgaaactcagaaactatgtttccttcttcatgtccgtgtctggttcaagcgtgtgttgatctttagcttcttccgttctctctgccagtatctgtggtgtgaaaactttctatattatcttgtgtttgcaagcagagaagtgtgctcttaaatatatatatatgctttgatgtgtttctctttttttttttttaatattatttatgagcactatggtttggttatgtttactcctttgggtctgtatcatattgagattgtaactttagctatatgaagatttttcttaaaagct

SEQ ID NO: 1306 - protein, 168 aa, Brassica napus; identical to SEQ ID NO: 918
  misc_feature: Ceres Clone ID no. 1030374
  misc_feature (1)..(168): Bit score of 368.8 for hmm based on sequences of FIGURE 7.
  misc_feature (109)..(149): Pfam Name: zf-AN1 Pfam Description: AN1-like Zinc finger
  misc_feature (15)..(39): Pfam Name: zf-A20 Pfam Description: A20-like zinc finger
  misc_feature: Functional Homolog Of SEQ ID NO. 742

SEQ ID NO: 1307 - DNA, 784 bp, Musa acuminata
  misc_feature: Ceres Clone ID no. 1738028
  misc_feature: Encodes the peptide sequence at SEQ ID NO. 1308
acgatgagaccggatgccaagcacgtgaaggaccaatcctttgcatcaacaactgtggattcttcggaagtgccgcaaccatgaacttgtgctccaagtgccacaaggacatgattctcaagcaggaacaggccaagatggcggcatcctcgatcgacagcctcgtgaatggcaatggcaatggcagtggcagtggaaaagagcccgtcgtttcgggtaatgctgttgttgctgttggctccatggagccgaaagtgatttcagcacagtcatccgatgctttagcctcaaacgaggccggagaggcaaaggcgaaggagggtccaaacaggtgtggcacctgcaggaaacgcgttggtctgactggtttcagttgtcggtgtgggaaccttttctgtgctgtgcaccgctactcggataagcacgactgccaattcgactaccgaaaggcggcccaggatgcaattgccaaagcaaaccctgtcattaaggccgaaaagcttgataagatctagagatatgggttaaaggttaatgaactctgttccgatgatctccacgttatcatcatgccttttctttcggttggctggatgttggtgtcttttgatcctatatatatggctggaggaatgatgcatggggcatccttgcagcctctcaagaacctctatcttgttgattggaaaaggtttgcatgttggatctggtgtgtaatctttaatttgtgctggtttgcatggtggatgagtacaacgttatgctttagttaggtttgtgactt

SEQ ID NO: 1308 - protein, 144 aa, Musa acuminata
  misc_feature: Ceres Clone ID no. 1738028
  misc_feature (1)..(144): Bit score of 219.6 for hmm based on sequences of FIGURE 7.
  misc_feature (85)..(125): Pfam Name: zf-AN1 Pfam Description: AN1-like Zinc finger
  misc_feature (15)..(39): Pfam Name: zf-A20 Pfam Description: A20-like zinc finger
  misc_feature: Functional Homolog Of SEQ ID NO. 742
MNLCSKCHKDMILKQEQAKMAASSIDSLVNGNGNGSGSGKEPVVSGNAVVAVGSMEPKVISAQSSDALASNEAGEAKAKEGPNRCGTCRKRVGLTGFSCRCGNLFCAVHRYSDKHDCQFDYRKAAQDAIAKANPVIKAEKLDKI

SEQ ID NO: 1309 - protein, 169 aa, Oryza sativa subsp. japonica
  misc_feature: Public GI ID no. 115455855
  misc_feature (1)..(169): Bit score of 216.6 for hmm based on sequences of FIGURE 7.
  misc_feature (109)..(149): Pfam Name: zf-AN1 Pfam Description: AN1-like Zinc finger
  misc_feature (21)..(45): Pfam Name: zf-A20 Pfam Description: A20-like zinc finger
  misc_feature: Functional Homolog Of SEQ ID NO. 742
MASMKRKCPDDETACGSGAGAAMCVTGCGFFGSEATNNMCSRCYREHSADNDAVEEAAAANSDLELVGVAETTTKKARMSAVVPVAVASSSSAAAEQPAAKAATAPNRCAACRKKVGLTGFKCRCGGNFCGGHRHADAHGCGFDYKSAGKEQIAKQNPLVVADKLATRI

SEQ ID NO: 1310 - protein, 165 aa, Lotus japonicus; identical to SEQ ID NO: 817
  misc_feature: Public GI ID no. 193237563
  misc_feature (1)..(165): Bit score of 338.5 for hmm based on sequences of FIGURE 7.
  misc_feature (106)..(146): Pfam Name: zf-AN1 Pfam Description: AN1-like Zinc finger
  misc_feature (13)..(37): Pfam Name: zf-A20 Pfam Description: A20-like zinc finger
  misc_feature: Functional Homolog Of SEQ ID NO. 742

SEQ ID NO: 1311 - protein, 148 aa, Arabidopsis thaliana
  misc_feature: Ceres seedline no. ME04246
  misc_feature (1)..(165): Bit score of 388.2 for hmm based on sequences of FIGURE 16.
  misc_feature (45)..(102): Pfam Name: KH_2 Pfam Description: KH domain
MATQISKKRKFVADGVFYAELNEVLTRELAEDGYSGVEVRVTPMRTEIIIRATRTQNVLGEKGRRIRELTSLVQKRFKFPQDSVELYAEKVANRGLCAIAQAESLRYKLLGGLAVRRACYGVLRFVMESGAKGCEVIVSGKLRAARAK

SEQ ID NO: 1312 - DNA, 501 bp, Brassica napus
  misc_feature: Ceres Clone ID no. 971761
  misc_feature: Encodes the peptide sequence at SEQ ID NO. 1313
atcacagctcctacttggttccagcgttcgacagatttacatttcaacaccatggcgactcagatcagcaagaagagaaagtttgtagcggacggtgtgttctacgctgaactgaatgaggttttaaccagagagctagcggaggatgggtactcaggtgtagaggttagggttactccaatgaggactgagattatcatcagagccacccgcactcaaaatgttctaggtgagaaggggaggaggatcagggagctgacatcacttgtgcagaagagatttaggtttcctcaagacagtgttgagctttacgctgagaaggtcgccaacagaggtctttgtgccattgctcaggctgagtctctccgttacaagcttctcggtggtcttgctgttcgcagggcttgctatggtgtattgagattcgtcatggagagtggagctaagggatgtgaggtgattgtaagtgggaagctccgtgctgcgcgtgccaagtccatg

SEQ ID NO: 1313 - protein, 150 aa, Brassica napus
  misc_feature: Ceres Clone ID no. 971761
  misc_feature (1)..(150): Bit score of 396.7 for hmm based on sequences of FIGURE 16.
  misc_feature (45)..(102): Pfam Name: KH_2 Pfam Description: KH domain
  misc_feature: Functional Homolog Of SEQ ID NO. 1311
MATQISKKRKFVADGVFYAELNEVLTRELAEDGYSGVEVRVTPMRTEIIIRATRTQNVLGEKGRRIRELTSLVQKRFRFPQDSVELYAEKVANRGLCAIAQAESLRYKLLGGLAVRRACYGVLRFVMESGAKGCEVIVSGKLRAARAKSM

SEQ ID NO: 1314 - DNA, 944 bp, Brassica napus
  misc_feature: Ceres Clone ID no. 1076093
  misc_feature: Encodes the peptide sequence at SEQ ID NO. 1315
acagcgcttcacccatcttctcgagattacttcagcaatttagggtttcagtgatccgcagctgcacacatcaaacatggcgactcagattagcaagaagagaaagtttgtagctgacggtgtgttctacgctgagctgaacgaggttctaaccagagagctagcggaagatggttactctggtgtggaggttagggttactccgatgaggactgagattatcatcagagccacacgtactcaaaatgttctcggtgagaagggaaggaggatcagagagttgacatctcttgtgcagaagagattcaggtttcctcaagacagtgttgagctttacgctgagaaggttgccaacagaggtctctgcgccattgctcaggctgagtctcttcgttacaagctcctcggtgggcttgctgttcgcagggcttgctatggtgtcttgagattcgtcatggagagtggtgctaagggttgtgaggttattgtgagtggaaagcttcgtgcagcacgtgccaagtccatgaaattcaaggacggttacatggtttcctctggtcaaccaaccaaggattacatcgactctgcagtgagacatgttctgcttagacagggtgtgctcggaatcaaggtgaaggtcatgcttgactgggaccctaagggaataaatggacccaagacaccattgcctgatgttgtcatcatccatactcccaaggaggaagacgtcaactctgcacctgctcaggttgctgctccggctgctcttgcaccagaagctcccctcactgccgtagactaccctgagatgatcccagtcgcctagaagaaaccctttggttacccctaccaggggatacttctctttttgttataactttctgtatctctggatactcactagttgtttttcctatgtcctcgaagtagacaagttttttctc

SEQ ID NO: 1315 - protein, 249 aa, Brassica napus
  misc_feature: Ceres Clone ID no. 1076093
  misc_feature (1)..(249): Bit score of 478.3 for hmm based on sequences of FIGURE 16.
  misc_feature (45)..(102): Pfam Name: KH_2 Pfam Description: KH domain
  misc_feature: Functional Homolog Of SEQ ID NO. 1311
MATQISKKRKFVADGVFYAELNEVLTRELAEDGYSGVEVRVTPMRTEIIIRATRTQNVLGEKGRRIRELTSLVQKRFRFPQDSVELYAEKVANRGLCAIAQAESLRYKLLGGLAVRRACYGVLRFVMESGAKGCEVIVSGKLRAARAKSMKFKDGYMVSSGQPTKDYIDSAVRHVLLRQGVLGIKVKVMLDWDPKGINGPKTPLPDVVIIHTPKEEDVNSAPAQVAAPAALAPEAPLTAVDYPEMIPVA

SEQ ID NO: 1316 - DNA, 631 bp, Papaver somniferum
  misc_feature: Ceres Clone ID no. 1627875
  misc_feature: Encodes the peptide sequence at SEQ ID NO. 1317
aatcatctctcctctctttctcaacagcagcagcagcagtttttagggttttcaaagacgagcagctaagtcgctctcgtcttctttccactcacagatcttcaatcatggcgactcaaatgagtaagaaacgaaagttcgttgctgatggagtgttcttcgctgagttgaacgaagtattgacaagagaactagctgaagatggttactctggtgttgaagttagggttacacctatgaggactgaaatcatcatcagagctaccagaactcaaaatgttcttggtgagaagggaaggaggattagagaattgacctctgttgtacagaagaggtttaagttccctgagaacagtgttgagctttacgctgagaaggttaacaacagaggtttatgtgctattgcccaagctgagtctctcagatacaagcttcttggtgggcttgctgttcgtagggcctgctatggtgttttgagattcgtcatggaaagtggtgccaagggttgcgaggttattgtgagtggaaagcttagggcagctcgtgcgaagtcaatgaagttcaaggatggatacatgatttcttctggtcagcctgttaacgagtacattgactcagccgttagacacgt

SEQ ID NO: 1317 - protein, 174 aa, Papaver somniferum
  misc_feature: Ceres Clone ID no. 1627875
  misc_feature (1)..(174): Bit score of 486.7 for hmm based on sequences of FIGURE 16.
  misc_feature (45)..(102): Pfam Name: KH_2 Pfam Description: KH domain
  misc_feature: Functional Homolog Of SEQ ID NO. 1311
MATQMSKKRKFVADGVFFAELNEVLTRELAEDGYSGVEVRVTPMRTEIIIRATRTQNVLGEKGRRIRELTSVVQKRFKFPENSVELYAEKVNNRGLCAIAQAESLRYKLLGGLAVRRACYGVLRFVMESGAKGCEVIVSGKLRAARAKSMKFKDGYMISSGQPVNEYIDSAVRH

SEQ ID NO: 1318 - DNA, 711 bp, Populus balsamifera subsp. trichocarpa
  misc_feature: Ceres Annot ID no. 1508362
  misc_feature: Encodes the peptide sequence at SEQ ID NO. 1319
atggctacccaaatcagtaagaagcgcaaatttgttgcggatggagttttctacgcagagctgaatgaggtattgaccagagaattggctgaggatggatactctggtgttgaagttagggttactccgatgcgcactgagatcatcatcagggctactcgtactcaaaatgttcttggtgagaagggaaggaggatcagggagctgacttctgttgttcagaaacgttttaagtttcctgagaatggtgtggagctctatgctgagaaagttaacaacaggggtctctgtgccattgctcaggctgagtctcttcgttacaagcttcttggaggccttgctgttcgcagggcttgctatggtgtcctgagatttgtaatggagagtggggcaaaaggatgtgaggttattgtgagtggaaagcttagggcacagcgtgccaaatccatgaaatttaaggatgggtacatgatatcctctggccaacctgttaaagaatatattgatgcagctgttaggcatgttcttcttagacagggagtgcttggtatcaaggtcaagatcatgcttgactgggatcctaagggcaaggtggggccaatgactccactacctgatctggtcaccatccatcctcccaaggaagaagaagagtatgttgctccaccagtgatgacaaccaatatcgagattccagtagcattagcataa

SEQ ID NO: 1319 - protein, 236 aa, Populus balsamifera subsp. trichocarpa
  misc_feature: Ceres Annot ID no. 1508362
  misc_feature (1)..(236): Bit score of 488.3 for hmm based on sequences of FIGURE 16.
  misc_feature (45)..(102): Pfam Name: KH_2 Pfam Description: KH domain
  misc_feature: Functional Homolog Of SEQ ID NO. 1311
MATQISKKRKFVADGVFYAELNEVLTRELAEDGYSGVEVRVTPMRTEIIIRATRTQNVLGEKGRRIRELTSVVQKRFKFPENGVELYAEKVNNRGLCAIAQAESLRYKLLGGLAVRRACYGVLRFVMESGAKGCEVIVSGKLRAQRAKSMKFKDGYMISSGQPVKEYIDAAVRHVLLRQGVLGIKVKIMLDWDPKGKVGPMTPLPDLVTIHPPKEEEEYVAPPVMTTNIEIPVALA

SEQ ID NO: 1320 - DNA, 702 bp, Populus balsamifera subsp. trichocarpa
  misc_feature: Ceres Annot ID no. 1526950
  misc_feature: Encodes the peptide sequence at SEQ ID NO. 1321
atggccactcaaatcagtaagaaacgcaagtttgttgcggatggagttttctacgcagaactgaacgaggtattgactagagaattggctgaggatggatactctggtgttgaagttagggttactcccatgcgcaccgagatcatcatcagggctactcgtacccaaaatgttcttggtgagaagggaaggaggatcagggagctcacttccgttgtccagaaacgtttcaagtttcccgagaatggtgtcgagctctatgctgagaaagttaacaacaggggtctctgtgccattgcgcaggccgagtctcttcgttacaagctccttggaggccttgctgttcgcagggcttgttatggagtgttgaggtttgtaatggagagtggggcaaaaggatgtgaggttattgtgagtggaaagcttcgggcacagcgtgccaaatccatgaaattcaaggatgggtacatgatatcctctggccaacctgttaaagagtatattgattcagctgttaggcatgttcttcttagacagggtgtgcttggtatcaaggtcaagatcatgcttgactgggatccaaagggcaaggttgggccaatgacaccattacctgatctggtcacaatccatcctcccaaggaagaagaagagtatgttccaccattgttgaccaccaatattgagatcccagtagcataa

SEQ ID NO: 1321 - protein, 233 aa, Populus balsamifera subsp. trichocarpa
  misc_feature: Ceres Annot ID no. 1526950
  misc_feature (1)..(233): Bit score of 488.3 for hmm based on sequences of FIGURE 16.
  misc_feature (45)..(102): Pfam Name: KH_2 Pfam Description: KH domain
  misc_feature: Functional Homolog Of SEQ ID NO. 1311
MATQISKKRKFVADGVFYAELNEVLTRELAEDGYSGVEVRVTPMRTEIIIRATRTQNVLGEKGRRIRELTSVVQKRFKFPENGVELYAEKVNNRGLCAIAQAESLRYKLLGGLAVRRACYGVLRFVMESGAKGCEVIVSGKLRAQRAKSMKFKDGYMISSGQPVKEYIDSAVRHVLLRQGVLGIKVKIMLDWDPKGKVGPMTPLPDLVTIHPPKEEEEYVPPLLTTNIEIPVA

SEQ ID NO: 1322 - DNA, 1163 bp, Gossypium hirsutum
  misc_feature: Ceres Clone ID no. 1832333
  misc_feature: Encodes the peptide sequence at SEQ ID NO. 1323
attcatcaaatgtattttttaaatttccaaaaaagataatcttctaaaaatgaaaataaaacaaaaaatagaaaaccatcttttcttgtatttggattttggtttgaaaagtaattttgggtatctaacctaaccctagcccgccacctatccatatattttcgccccataaaaggaacactagttatactgttagctaattactagcaaagcggcgaagcgatttgcaatctcaactcaccgtttctcacgattggattctccttaaaatcatggctgctcagattagcaagaagcgcaagtttgttgcggatggagtgttttacgcggagctaaatgaggttttgacaagggagcttgctgaggatggatactccggagttgaagttagagttactcctatgcgtactgagatcatcatcagagctactcgtactcaaaatgttcttggtgagaagggtagaaggattagagagttgacttctgttgttcagaaacgattcaagtttccagagaacagtgtggaactctatgctgagaaagttaacaacaggggtctttgcgccattgcacaggccgaatccctgcgatacaagctccttggaggccttgctgttcggagggcttgctatggtgttctcagatttgtcatggagagtggagccaagggatgcgaggtcatagtgagtggaaaactccgagctcagcgtgcaaagtcgatgaagttcaaggatgggtacatgatatcctctggtcatcccgtcaaggaatatattgattctgctgttagacatgtccttcttaggcagggtgtgctgggtatcaaagttaaaatcatgctggattgggatccaaagggcaagcagggtccaatgaccccattgcctgatctcgtcaccatccaccctcccaaggaagaggaagagtatacagaaaagaaggactttgaaccgcttgctcccccaaccaatatcgaggttcctgttgtggtttagagcccaccccaaatgagccttgaatgtagtgtttcactcaagttttcaactatttagttaaaggagatcactagatttctgccagtacggattactattttgcgaatgaggtggattttggtcgtgtttagtgtacttggtatattttaaaggaatattattaagctc

SEQ ID NO: 1323 - protein, 240 aa, Gossypium hirsutum
  misc_feature: Ceres Clone ID no. 1832333
  misc_feature (1)..(240): Bit score of 486.6 for hmm based on sequences of FIGURE 16.
  misc_feature (45)..(102): Pfam Name: KH_2 Pfam Description: KH domain
  misc_feature: Functional Homolog Of SEQ ID NO. 1311
MAAQISKKRKFVADGVFYAELNEVLTRELAEDGYSGVEVRVTPMRTEIIIRATRTQNVLGEKGRRIRELTSVVQKRFKFPENSVELYAEKVNNRGLCAIAQAESLRYKLLGGLAVRRACYGVLRFVMESGAKGCEVIVSGKLRAQRAKSMKFKDGYMISSGHPVKEYIDSAVRHVLLRQGVLGIKVKIMLDWDPKGKQGPMTPLPDLVTIHPPKEEEEYTEKKDFEPLAPPTNIEVPVVV

SEQ ID NO: 1324 - protein, 230 aa, Chlamydomonas incerta
  misc_feature: Public GI ID no. 74272607
  misc_feature (1)..(230): Bit score of 468.1 for hmm based on sequences of FIGURE 16.
  misc_feature (45)..(102): Pfam Name: KH_2 Pfam Description: KH domain
  misc_feature: Functional Homolog Of SEQ ID NO. 1311
MAVQISKKRKFVADGVFYAELNELLTRELAEDGYSGVEVRVTPMRTEIIIRATRTQNVLGEKGRRIRELTSVVQKRFNFPPDSVELYAEKVSDRGLCAIAQAESLRYKLLGGLAVRRACYGVLRFVMESGAKGCEVIVSGKLRAARAKSMKFKDGYMVSSGHPARVYIDGAVRHVLLRQGVLGIKVKIMKEWDPTGKRGPRTPLPDVVKVLEPKEEEVYQEKPYIGKEEL

SEQ ID NO: 1325 - protein, 235 aa, Elaeis guineensis
  misc_feature: Public GI ID no. 192910782
  misc_feature (1)..(235): Bit score of 483.4 for hmm based on sequences of FIGURE 16.
  misc_feature (45)..(102): Pfam Name: KH_2 Pfam Description: KH domain
  misc_feature: Functional Homolog Of SEQ ID NO. 1311
MATQMSKKRKFVADGVFYAELNEVLTRELAEDGYSGVEVRVTPMRTEIIIRATRTQNVLGEKGRRIRELTSVVQKRFSFPENSVELYAEKVNNRGLCAIAQAESLRYKLLGGLAVRRACYGVLRFVMESGAKGCEVIVSGKLRAQRAKSMKFKDGYMISCGQPVKEYIDSAVRHVLLRQGVLGIKVKIMLDWDPKGKQGPATPLPDLASIHTPKDEEEYMRPPLTMAPELEVPVA

SEQ ID NO: 1326 - protein, 234 aa, Vitis vinifera
  misc_feature: Public GI ID no. 157342563
  misc_feature (1)..(234): Bit score of 486.3 for hmm based on sequences of FIGURE 16.
  misc_feature (45)..(102): Pfam Name: KH_2 Pfam Description: KH domain
  misc_feature: Functional Homolog Of SEQ ID NO. 1311
MATQMSKKRKFVADGVFFAELNEVLTRELAEDGYSGVEVRVTPMRTEIIIRATRTQNVLGEKGRRIRELTSVVQKRFKFPENSVELYAEKVNNRGLCAVAQAESLRYKLLGGLAVRRACYGVLRFIMESGAKGCEVIVSGKLRAQRAKSMKFKDGYMISSGQPVKEYIDSAVRHVLLRQGVLGIKVKIMLDWDPKGKQGPKTPLPDLVTIHTPKEEEEYIRPEKLATDIEVPTA

SEQ ID NO: 1327 - protein, 230 aa, Chlamydomonas reinhardtii
  misc_feature: Public GI ID no. 159483497
  misc_feature (1)..(230): Bit score of 464.8 for hmm based on sequences of FIGURE 16.
  misc_feature (45)..(102): Pfam Name: KH_2 Pfam Description: KH domain
  misc_feature: Functional Homolog Of SEQ ID NO. 1311
MAVQISKKRKFVQDGVFYAELNELLTRELAEDGYSGVEVRVTPMRTEIIIRATRTQNVLGEKGRRIRELTSVVQKRFNFPPDSVELYAEKVSDRGLCAIAQAESLRYKLLGGLAVRRACYGVLRFVMESGAKGCEVIVSGKLRAARAKSMKFKDGYMVSSGNPAKVYIDGAVRHVLLRQGVLGIKVKIMKEWDPTGKRGPRTPLPDVVKVLEPKEEEVYQEKPYIGKEEL

SEQ ID NO: 1328 - DNA, 1410 bp, Gossypium hirsutum
  misc_feature: Ceres Clone ID no. 1839999
  misc_feature: Encodes the peptide sequence at SEQ ID NO. 1329
tgctcacgcaatgtgatttctgcccagtgctctgaatgtcaaagtgaagaaattcaaccaagcgcgggtaaacggcgggagtaactatgactctcttaaggtagccaaatgcctcgtcatctaattagtgacgcgcatgaatggattaacgagattcccactgtccctgtctactatccagcgaaaccacagccaagggaacgggcttggcagaatcagcggggaaagaagaccctgttgagcttgactctagtccgactttgtgaaatgacttgagaggtgtaggataagtgggagctctcgggcgaaattgaaataccactacttttaacgttattttacttattccgtgaatcggaggcggggcacggcccctctttttggacccaaggccggcttcggccggccgatccgggcggaagacattgtcaggtggggagtttggctggggcggcacatctgttaaagtcttcttcagatcttatattcctgcaaattcccttcttttcccctccacccaagcctaaaaaatcatggcgacagctcaaatcagcaaaaagcgaaagttcgtcgctgatggagttttcttcgcggaactcaacgaggtattgaccagggaactggctgaggatggatactctggagtcgaagtcagagttactcctatgcgtacggagatcatcatcagagccacccgcacccaaaacgttctcggtgagaaaggtaggaggattagggagcttacctcagtggttcagaagcgattcaagttcccagaaaacagcgtcgagctttacgctgagaaggtcaacaacagaggtctttgcgctattgctcaggccgagtctcttcgctacaagctactcggaggtcttgccgttcgcagggcctgctatggtgtattgagattcatcatggagagtggtgccaagggatgcgaggttattgttagtggaaagctaagggcacagcgtgccaaatctatgaaattcaaggatggatatatgatctcttctggtcatcctgtcaatgagtatattgactctgctgtcagacatgttcttttgagacagggggtgcttggtatcaaggtcaagatcatgcttgactgggatcctaagggtaagcaaggccctactactcccctacctgatctagtcacaatccaccctcccaaggaggatgaagaaatcaggagagtagagcctgagccaactaatattgaggttccagttatggcttaaatgctgttttggttgacatctttttgattttaggaagtatgcgagtttcttagttttatgtagctaaaagtttggcctcaaagaccgctgctggttgcggtttcttctttttgtacttttaatgtttctcctactatagttattacgtaatcggtaattttctttc

SEQ ID NO: 1329 - protein, 236 aa, Gossypium hirsutum
  misc_feature: Ceres Clone ID no. 1839999
  misc_feature (1)..(236): Bit score of 486.0 for hmm based on sequences of FIGURE 16.
  misc_feature (46)..(103): Pfam Name: KH_2 Pfam Description: KH domain
  misc_feature: Functional Homolog Of SEQ ID NO. 1311
MATAQISKKRKFVADGVFFAELNEVLTRELAEDGYSGVEVRVTPMRTEIIIRATRTQNVLGEKGRRIRELTSVVQKRFKFPENSVELYAEKVNNRGLCAIAQAESLRYKLLGGLAVRRACYGVLRFIMESGAKGCEVIVSGKLRAQRAKSMKFKDGYMISSGHPVNEYIDSAVRHVLLRQGVLGIKVKIMLDWDPKGKQGPTTPLPDLVTIHPPKEDEEIRRVEPEPTNIEVPVMA

SEQ ID NO: 1330 - DNA, 611 bp, Gossypium hirsutum
  misc_feature: Ceres Clone ID no. 1946574
  misc_feature: Encodes the peptide sequence at SEQ ID NO. 1331
ctgagccgtcttcttcagatctcatattcctgcaaattcccttcttttcccctccacccaagcctaaaaaatcatggcgacagctcaaatcagcaaaaagcgaaagttcgtcgctgatggagttttcttcgcggaactcaacgaggtattgaccagggaactggctgaggatggatactctggagtcgaagtcagagttactcctatgcgtaccgagatcatcatcagagccacccgcacccaaaacgttctcggtgaaaaaggtaggaggattagggagcttacctcagtggttcagaagcgattcaagttcccagaaaacagcgtcgagctttacgctgagaaggtcaacaacagaggcctttgcgctattgcccaggccgagtctcttcgctacaagctactcggaggtcttgccgttcgcagggcctgctatggtgtactgagattcatcatggagagtggtgccaagggatgcgaggttattgttagtggaaagctaagagcacagcgtgccaaatctatgaaattcaaggatggatatatgatctcttctggtcatcctgtcaatgagtatattgactctgctgtcagacatgttcttttgagac

SEQ ID NO: 1331 - protein, 179 aa, Gossypium hirsutum
  misc_feature: Ceres Clone ID no. 1946574
  misc_feature (1)..(179): Bit score of 486.0 for hmm based on sequences of FIGURE 16.
  misc_feature (46)..(103): Pfam Name: KH_2 Pfam Description: KH domain
  misc_feature: Functional Homolog Of SEQ ID NO. 1311
MATAQISKKRKFVADGVFFAELNEVLTRELAEDGYSGVEVRVTPMRTEIIIRATRTQNVLGEKGRRIRELTSVVQKRFKFPENSVELYAEKVNNRGLCAIAQAESLRYKLLGGLAVRRACYGVLRFIMESGAKGCEVIVSGKLRAQRAKSMKFKDGYMISSGHPVNEYIDSAVRHVLLR

SEQ ID NO: 1332 - DNA, 939 bp, Glycine max
  misc_feature: Ceres Clone ID no. 467335
  misc_feature: Encodes the peptide sequence at SEQ ID NO. 1333
tattcctcaagaactagggtttgcagtcactgctctgtttcaccgagtttgggcgtttagatcagaaccaaatcgtgttctcttccattggcaaacatggcaactcaaatgagcaagaagagaaagtttgttgcggacggagtgttctttgccgaactgaacgaggttctgacacgtgaattggcggaggacggttactccggcgtcgaagttagggttacgccgatgcgcaccgagatcatcatcagagccaccagaacccaagccgttctaggtgagaagggaaggagaattagggaacttacctcagtggtgcagaagaggttcaaattccccgaaaacagcgtcgagctttatgctgagaaggtcaacaacagaggcctgtgtgccattgctcaggccgagtcgcttcgctacaagcttctcggtggcctcgccgttcgcagggcttgctatggtgttttaagatttgtgatggaaagtggtgccaagggttgtgaggtgattgttagtggaaagttgagggctcagagagccaaatccatgaaattcaaggatgggtacatgatcttttctggacaaccagtcaaggattacattgactctgcagtgagacatgtcctcctaagacagggtgttcttggtatcaaggttaagatcatgcttgattgggatcctaaagggaaacagggtcctaaaactccccttcctgatcttgtcacaatccacactcctaaggaagaggaagaatatgcccgtcctgctgctgttttggcaaccaatattgaggtccctgttgcttcttaagtagaaatcatagcacctgagtacctagtatgcagtgttcattggcttagacgtggtcagatttttgtagtgtcttatcttttcaagaatttttatactccagtacaaggatccaagcataaattatgttac

SEQ ID NO: 1333 - protein, 236 aa, Glycine max
  misc_feature: Ceres Clone ID no. 467335
  misc_feature (1)..(236): Bit score of 481.8 for hmm based on sequences of FIGURE 16.
  misc_feature (45)..(102): Pfam Name: KH_2 Pfam Description: KH domain
  misc_feature: Functional Homolog Of SEQ ID NO. 1311
MATQMSKKRKFVADGVFFAELNEVLTRELAEDGYSGVEVRVTPMRTEIIIRATRTQAVLGEKGRRIRELTSVVQKRFKFPENSVELYAEKVNNRGLCAIAQAESLRYKLLGGLAVRRACYGVLRFVMESGAKGCEVIVSGKLRAQRAKSMKFKDGYMIFSGQPVKDYIDSAVRHVLLRQGVLGIKVKIMLDWDPKGKQGPKTPLPDLVTIHTPKEEEEYARPAAVLATNIEVPVAS

SEQ ID NO: 1334 - protein, 231 aa, Physcomitrella patens subsp. patens
  misc_feature: Public GI ID no. 168010087
  misc_feature (1)..(231): Bit score of 478.2 for hmm based on sequences of FIGURE 16.
  misc_feature (45)..(102): Pfam Name: KH_2 Pfam Description: KH domain
  misc_feature: Functional Homolog Of SEQ ID NO. 1311
MATQMSKKRKFVADGVFFAELNELLTRELAEDGYSGVEVRVTPMRTEIIIRATRTQNVLGEKGRRIRELTSVVQKRFQFPEGTVELYAEKVNNRGLCAIAQAESLRYKLLGGLAVRRACYGVLRFIMESGAKGCEVIVSGKLRAARAKSMKFKDGYMISSGSPVNDYIDSAVRHVMLRQGVLGIKVKIMLDWDPKGKQGPMTPLPDVVTIHMPKEEEEFAHKPHVGKEAEM

SEQ ID NO: 1335 - DNA, 783 bp, Musa acuminata
  misc_feature: Ceres Clone ID no. 1728202
  misc_feature: Encodes the peptide sequence at SEQ ID NO. 1336
gtctagggtttcacagagaaccaacaccgctacaccatacgaagagcggcggcgagttcgttccccctcgaataacctccgagatggcaacccagatgagtaagaagcgaaagtttgtggcggatggggtgttcttcgcggagttgaacgaggtgctaacgagagagttggcggaggatggctattcgggtgtggaggttagggttacgcccatgcggaccgagatcattattcgggcgacgcgcacacagaacgtccttggtgagaagggaagaaggatcagggaattgacatcggtggtgcagaaaagattcaactttccggagaatggcgttgagctctacgccgagaaggtgaacaatagggggctctgtgccattgctcaggctgaatcgctccgttacaagcttcttggcggccttgccgttaggagggcctgttatggtgttctgaggtttgtcatggagagtggtgcaaaggggtgtgaggtaattgtaagcggaaagctcagggctcagcgtgccaagtccatgaagttcaaggatgggtatatgatttcttctggtcagccggtcaatgaatatattgactctgcagtgaggcatattctcctaagacagggtgttcttggaatcaaggtcaaaattatgttggattgggatccaaagggaaagcaaggtcctactacgcctctgccagatctcgtcaccattcatccaccaaaggacgaagatgaatatgtcaggccaacaccaactttggctccagaggtagccatcgtct

SEQ ID NO: 1336 - protein, 233 aa, Musa acuminata
  misc_feature: Ceres Clone ID no. 1728202
  misc_feature (1)..(233): Bit score of 488.9 for hmm based on sequences of FIGURE 16.
  misc_feature (45)..(102): Pfam Name: KH_2 Pfam Description: KH domain
  misc_feature: Functional Homolog Of SEQ ID NO. 1311
MATQMSKKRKFVADGVFFAELNEVLTRELAEDGYSGVEVRVTPMRTEIIIRATRTQNVLGEKGRRIRELTSVVQKRFNFPENGVELYAEKVNNRGLCAIAQAESLRYKLLGGLAVRRACYGVLRFVMESGAKGCEVIVSGKLRAQRAKSMKFKDGYMISSGQPVNEYIDSAVRHILLRQGVLGIKVKIMLDWDPKGKQGPTTPLPDLVTIHPPKDEDEYVRPTPTLAPEVAIV

SEQ ID NO: 1337 - DNA, 694 bp, Panicum virgatum
  misc_feature: Ceres Clone ID no. 1994239
  misc_feature: Encodes the peptide sequence at SEQ ID NO. 1338
ctctcgcgccgccactcccctcccgttccgctcgcccaaaaccctagcgctccccaccgccgcagcgagcgcctcctctccctccgtcaaccatggcgacccagatcagcaagaagaagaagttcgtcagcgatggtgtgttctacgcggagctgaacgagatgctgacgcgggagctcgcggaggatggctactccggcgtggaggtgcgcgtcaccccgatgcgcacggagatcatcatccgcgccacgcgcacccagaacgtgctcggcgagaagggccgcaggatcagggagctcacctccgtagtccagaagcggttcaacttccccgagaacggcgtcgagctctacgccgagaaggtcgtcaaccgcggcctctgcgccatcgcccaggccgagtccctccgctacaagctccttggaggcctcgccgtccgcagggcttgctatggtgttcttcgctttgttatggagagtggtgccaagggttgtgaggtcattgtgagtggaaagctcagggcccaaagagccaagtccatgaagttcaaggatggctacatgatctcatctggtcagcctgtgaacgagtacattgactctgctgtcagacacgtccttctcagacagggtgttcttggcatcaaagttaagatcatgctcgactgggacccgaagggcaagcttggcccggt

SEQ ID NO: 1338 - protein, 200 aa, Panicum virgatum
  misc_feature: Ceres Clone ID no. 1994239
  misc_feature (1)..(200): Bit score of 488.5 for hmm based on sequences of FIGURE 16.
  misc_feature (45)..(102): Pfam Name: KH_2 Pfam Description: KH domain
  misc_feature: Functional Homolog Of SEQ ID NO. 1311
MATQISKKKKFVSDGVFYAELNEMLTRELAEDGYSGVEVRVTPMRTEIIIRATRTQNVLGEKGRRIRELTSVVQKRFNFPENGVELYAEKVVNRGLCAIAQAESLRYKLLGGLAVRRACYGVLRFVMESGAKGCEVIVSGKLRAQRAKSMKFKDGYMISSGQPVNEYIDSAVRHVLLRQGVLGIKVKIMLDWDPKGKLGP

SEQ ID NO: 1339 - DNA, 685 bp, Miscanthus x giganteus
  misc_feature: Ceres Clone ID no. 2055551
  misc_feature: Encodes the peptide sequence at SEQ ID NO. 1340
gccgccactcccctaccgacccactcgcccaaaaccctagcgctcttgcccgctcgccgccgccgccggagcgggctccccatcttcctcagtcaaccatggcgacccagatcagcaagaagaagaagttcgtcagcgacggtgtgttctacgccgagctcaacgagatgctgacgcgggagctggcggaggacggctactccggcgtggaggtgcgcgtcacgccgatgcgcacggagatcatcatccgcgccacgcgcacgcagaatgtgcttggcgagaagggccgcaggatcagggagctcacctccgtcgtccagaagaggttcaacttccccgagaacggcgtcgagctctacgccgagaaggtcgtcaaccgcggcctctgcgccatcgcgcaggctgagtccctccgctacaagctcctcggaggccttgccgtccggagggcttgctatggtgttcttcgctttgttatggagagtggtgccaagggttgtgaggttattgtgagtggaaagctcagggcccaaagagccaagtccatgaaattcaaggatggctacatgatctcatctggtcagccagttaacgagtacattgacgcagctgtgagacacgtccttctcagacagggtgttctgggtatcaaggtgaagatcatgctcgactgggacccgaaagg

SEQ ID NO: 1340 - protein, 195 aa, Miscanthus x giganteus
  misc_feature: Ceres Clone ID no. 2055551
  misc_feature (1)..(195): Bit score of 488.5 for hmm based on sequences of FIGURE 16.
  misc_feature (45)..(102): Pfam Name: KH_2 Pfam Description: KH domain
  misc_feature: Functional Homolog Of SEQ ID NO. 1311
MATQISKKKKFVSDGVFYAELNEMLTRELAEDGYSGVEVRVTPMRTEIIIRATRTQNVLGEKGRRIRELTSVVQKRFNFPENGVELYAEKVVNRGLCAIAQAESLRYKLLGGLAVRRACYGVLRFVMESGAKGCEVIVSGKLRAQRAKSMKFKDGYMISSGQPVNEYIDAAVRHVLLRQGVLGIKVKIMLDWDPK

SEQ ID NO: 1341 - DNA, 687 bp, Sorghum bicolor
  misc_feature: Ceres Annot ID no. 8704704
  misc_feature: Encodes the peptide sequence at SEQ ID NO. 1342
atggcgacccagatcagcaagaagaagaagttcgtcagcgacggtgtgttctacgccgagcttaacgagatgctgacgcgggagctggccgaggacggctactccggcgtggaggtgcgcgtcacgccgatgcgcacggagatcatcatccgcgccacgcgcacgcagaacgtgctcggtgagaagggtcgcaggatcagggagctgacctctgtcgtccagaagaggttcaacttccccgagaacggcgtcgagctctacgccgagaaggtcgtcaaccgcggcctctgcgccatcgcgcaggctgagtccctccgctacaagctcctcggaggccttgccgtccggagggcttgctatggtgttcttcgcttcgttatggagagtggtgctaagggttgtgaggtcattgtcagtggaaagctcagggcccaaagagccaagtccatgaaattcaaggatggctacatgatctcatctggtcagccagtgaatgagtacattgattcggctgtgagacacgtccttctcagacagggtgttcttggtatcaaggtgaagatcatgctcgactgggacccgaagggcaaggttggtccaatcacccctcttccggacctggtgaccatccataccccgaaggacgaggatgagctgcgccctccggtcttggcacctgaggtctaa

SEQ ID NO: 1342 - protein, 228 aa, Sorghum bicolor
  misc_feature: Ceres Annot ID no. 8704704
  misc_feature (1)..(228): Bit score of 488.5 for hmm based on sequences of FIGURE 16.
  misc_feature (45)..(102): Pfam Name: KH_2 Pfam Description: KH domain
  misc_feature: Functional Homolog Of SEQ ID NO. 1311
MATQISKKKKFVSDGVFYAELNEMLTRELAEDGYSGVEVRVTPMRTEIIIRATRTQNVLGEKGRRIRELTSVVQKRFNFPENGVELYAEKVVNRGLCAIAQAESLRYKLLGGLAVRRACYGVLRFVMESGAKGCEVIVSGKLRAQRAKSMKFKDGYMISSGQPVNEYIDSAVRHVLLRQGVLGIKVKIMLDWDPKGKVGPITPLPDLVTIHTPKDEDELRPPVLAPEV

SEQ ID NO: 1343 - protein, 228 aa, Oryza sativa subsp. japonica
  misc_feature: Public GI ID no. 115453877
  misc_feature (1)..(228): Bit score of 488.5 for hmm based on sequences of FIGURE 16.
  misc_feature (45)..(102): Pfam Name: KH_2 Pfam Description: KH domain
  misc_feature: Functional Homolog Of SEQ ID NO. 1311
MATQISKKKKFVSDGVFYAELNEMLTRELAEDGYSGVEVRVTPMRTEIIIRATRTQNVLGEKGRRIRELTSVVQKRFNFPENGVELYAEKVVNRGLCAIAQAESLRYKLLGGLAVRRACYGVLRFVMESGAKGCEVIVSGKLRAQRAKSMKFKDGYMISSGQPVNEYIDSAVRHVLLRQGVLGIKVKIMLDWDPKGKVGPTTPLPDLVTIHAPKEEEELRPPVLIAEA

SEQ ID NO: 1344 - DNA, 674 bp, Glycine max
  misc_feature: Ceres Clone ID no. 1646411
  misc_feature: Encodes the peptide sequence at SEQ ID NO. 1345
agttgctttgtttcactcacactgtgtttggagcagaatcagatcgtgtgttccgtacgttcgttcgttcatttccagtgtcaaacatggcgtctcagatgagcaagaagagaaagtttgttgcggacggagtgttcttcgccgaactgaacgaggttctgacacgtgaattggcggaggacggttactccggcgtggaagttagggttacgccgatgcgcaccgagatcatcatcagagccaccagaacccaggctgttctaggtgagaagggaaggagaattagggaacttacctcagtggtgcagaagaggttcaaattccccgaaaacagtgtcgagctttatgctgagaaggtcaacaacagaggcttgtgtgccattgctcaggccgagtcgcttcgctacaagctcctcggcggcctcgctgttcgcagggcttgctatggtgttttaagatttgtgatggaaagcggtgccaaaggatgcgaggtcattgttagtggaaaactgagagctcagagagccaagtccatgaaattcaaggatggatatatgatttcttctggacaaccagtcaaggattacattgactctgcagtgagacatgtgctactaagacagggtgttcttggtatcaaggttaagatcatgctttgattgggatcctaaagg

SEQ ID NO: 1345 - protein, 190 aa, Glycine max
  misc_feature: Ceres Clone ID no. 1646411
  misc_feature (1)..(190): Bit score of 482.9 for hmm based on sequences of FIGURE 16.
  misc_feature (45)..(102): Pfam Name: KH_2 Pfam Description: KH domain
  misc_feature: Functional Homolog Of SEQ ID NO. 1311
MASQMSKKRKFVADGVFFAELNEVLTRELAEDGYSGVEVRVTPMRTEIIIRATRTQAVLGEKGRRIRELTSVVQKRFKFPENSVELYAEKVNNRGLCAIAQAESLRYKLLGGLAVRRACYGVLRFVMESGAKGCEVIVSGKLRAQRAKSMKFKDGYMISSGQPVKDYIDSAVRHVLLRQGVLGIKVKIML

SEQ ID NO: 1346 - DNA, 591 bp, Zea mays
  misc_feature: Ceres Clone ID no. 100045499
  misc_feature: Encodes the peptide sequence at SEQ ID NO. 1347
caacccactagctcaaaaccctagagctctcgcctgctcgcctccgccgccggagcgagctccccatcttcatccgtcaaccatggcgacccagatcagcaagaagaagaagttcgtcagcgacggtgttttctacgccgagctcaatgagatgctgacgcgggagctggcggaggacggctactctggcgtggaggtgcgcgtcacgccgatgcgcacggagatcatcatccgcgccacgcgcacgcagaacgtgctcggcgagaagggccgtaggatcagggagctcacctccgtcgtccagaagaggttcaacttccctgagaatggcgttgagctttatgccgagaaggtcgtcaaccgtgggctctgtgccatcgcgcaggccgagtccctccgttacaagctcctcggtggccttgccgtccgcagggcttgctacggtgttcttcgttatgttatggagagtggtgccaagggttgtgaggtgatcgtgagtggaaagctcagggcccaaagagccaagtccatgaagttcaaggatggctacatgatctcatctggtcagccagtgaacgagtacattgactc

SEQ ID NO: 1347 - protein, 169 aa, Zea mays
  misc_feature: Ceres Clone ID no. 100045499
  misc_feature (1)..(169): Bit score of 487.2 for hmm based on sequences of FIGURE 16.
  misc_feature (45)..(102): Pfam Name: KH_2 Pfam Description: KH domain
  misc_feature: Functional Homolog Of SEQ ID NO. 1311
MATQISKKKKFVSDGVFYAELNEMLTRELAEDGYSGVEVRVTPMRTEIIIRATRTQNVLGEKGRRIRELTSVVQKRFNFPENGVELYAEKVVNRGLCAIAQAESLRYKLLGGLAVRRACYGVLRYVMESGAKGCEVIVSGKLRAQRAKSMKFKDGYMISSGQPVNEYID

SEQ ID NO: 1348 - DNA, 933 bp, Zea mays
  misc_feature: Ceres Clone ID no. 100920260
  misc_feature: Encodes the peptide sequence at SEQ ID NO. 1349
ctcgcctccgccgccggagcgagctccccatcttcatccgtcaaccatggcgacccagatcagcaagaagaagaagttcgtcagcgacggtgttttctacgccgagctcaatgagatgctgacgcgggagctggcggaggacggctactctggcgtggaggtgcgcgtcacgccgatgcgcacggagatcatcatccgcgccacgcgcacgcagaacgtgctcggcgagaagggccgtaggatcagggagctcacctccgtcgtccagaagaggttcaacttccctgagaatggcgttgagctttatgccgagaaggtcgtcaaccgtgggctctgtgccatcgcgcaggccgagtccctccgttacaagctcctcggtggccttgccgtccgcagggcttgctacggtgttcttcgttatgttatggagagtggtgccaagggttgtgaggtgatcgtgagtggaaagctcagggcccaaagagccaagtccatgaagttcaaggakggctacatgatytcwtytggtcagccagtgaacgagtacattgaytcggctgtgagacacgttyttytcagacagggtgttyttggcatcaaggtgaagatcatgcttgactgggacccgaagggcaaggttggcccgatcactcytyttccggacctggkgmccatccmcmccccgaaggasgaggacgagccgcgccctccggtcttggcmcctcctgaggkgtaaggtcccaactgtgtccttgaaatggcagtttgatcgggtcctagataggttttttttttacgataaggacaatgttaaggcagttggttcccttaatctttatggacagatgctatgtgttgcttttgtggcacttttgtttaagttaagttttggggagccaagatacttatatatgttcccgaggaaattagggt

SEQ ID NO: 1349 - protein, 229 aa, Zea mays
  misc_feature: Ceres Clone ID no. 100920260
  misc_feature (1)..(229): Bit score of 469.9 for hmm based on sequences of FIGURE 16.
  misc_feature (45)..(102): Pfam Name: KH_2 Pfam Description: KH domain
  misc_feature: Functional Homolog Of SEQ ID NO. 1311
  misc_feature (154)..(154): Xaa is any aa, unknown, or other
  misc_feature (158)..(158): Xaa is any aa, unknown, or other
  misc_feature (159)..(159): Xaa is any aa, unknown, or other
  misc_feature (160)..(160): Xaa is any aa, unknown, or other
  misc_feature (169)..(169): Xaa is any aa, unknown, or other
  misc_feature (176)..(176): Xaa is any aa, unknown, or other
  misc_feature (177)..(177): Xaa is any aa, unknown, or other
  misc_feature (182)..(182): Xaa is any aa, unknown, or other
  misc_feature (203)..(203): Xaa is any aa, unknown, or other
  misc_feature (204)..(204): Xaa is any aa, unknown, or other
  misc_feature (208)..(208): Xaa is any aa, unknown, or other
  misc_feature (209)..(209): Xaa is any aa, unknown, or other
  misc_feature (211)..(211): Xaa is any aa, unknown, or other
  misc_feature (212)..(212): Xaa is any aa, unknown, or other
  misc_feature (215)..(215): Xaa is any aa, unknown, or other
  misc_feature (225)..(225): Xaa is any aa, unknown, or other
  misc_feature (229)..(229): Xaa is any aa, unknown, or other
MATQISKKKKFVSDGVFYAELNEMLTRELAEDGYSGVEVRVTPMRTEIIIRATRTQNVLGEKGRRIRELTSVVQKRFNFPENGVELYAEKVVNRGLCAIAQAESLRYKLLGGLAVRRACYGVLRYVMESGAKGCEVIVSGKLRAQRAKSMKFKXGYMXXXGQPVNEYIXSAVRHVXXRQGVXGIKVKIMLDWDPKGKVGPITXXPDLXXIXXPKXEDEPRPPVLXPPEX

SEQ ID NO: 1350 - protein, 233 aa, Picea sitchensis
  misc_feature: Public GI ID no. 116786147
  misc_feature (1)..(233): Bit score of 484.3 for hmm based on sequences of FIGURE 16.
  misc_feature (45)..(102): Pfam Name: KH_2 Pfam Description: KH domain
  misc_feature: Functional Homolog Of SEQ ID NO. 1311
MATQMSKKKKFVADGVFFAELNEVLTRELAEDGYSGVEVRVTPMRTEIIIRATRTQNVLGEKGRRIRELTSVVQKRFNFPEGTVELYAEKVNNRGLCAIAQAESLRYKLLGGLAVRRACYGVLRFIMESGAKGCEVIVSGKLRAQRAKSMKFKDGYMISSGQPVNEYIDKAVRHVLLRQGVLGIKVKIMLDWDPKGKQGPTTPLPDLVTIHTPKEEEEFAAKPQLGKETEILV

SEQ ID NO: 1351 - protein, 233 aa, Picea sitchensis
  misc_feature: Public GI ID no. 116783944
  misc_feature (1)..(233): Bit score of 481.8 for hmm based on sequences of FIGURE 16.
  misc_feature (45)..(102): Pfam Name: KH_2 Pfam Description: KH domain
  misc_feature: Functional Homolog Of SEQ ID NO. 1311
MAKQMSKKRKFVADGVFFAELNEVLTRELAEDGYSGVEVRVTPMRTEIIIRATRTQNVLGEKGRRIRELTSVVQKRFNFPEGTVELYAEKVNNRGLCAIAQAESLRYKLLGGLAVRRACYGVLRFIMESGAKGCEVIVSGKLRAQRAKSMKFKDGYMISSGQPVNEYIDRAVRHVLLRQGVLGIKVKIMLDWDPKGKQGPTKPLPDFVTIYTPKDEEDFSSKPSVGNEVEILA

SEQ ID NO: 1352 - DNA, 608 bp, Glycine max
  misc_feature: Ceres Clone ID no. 1465853
  misc_feature: Encodes the peptide sequence at SEQ ID NO. 1353
tagcgccacactccaatcgtagccgtcgcactctgtgttttctgcgccgtctccgatctccgacaatggcgacccaaatgagcaagaagagaaagttcgtagctgatggagtgttcttcgctgaactgaacgaggttctgacaagagagttggccgaggacggttactccggcgtggaagttagggttacgccgatgcgcaccgaaatcataattagagccaccagaacccaagctgttctcggtgagaagggaaggagaataagggaacttacctctgtggttcagaagaggttcaagtttcccgagaacagtgttgaactttatgctgaaaaggtcaaccataggggtctttgcgctattgctcaggctgagtctcttcgctacaagctccttggtggactcgctgtgcgcatggcctgctatggtgttttgaggtttgttatggagagtggtgctaagggatgcgaggtcattgtgagtggaaaattgagagcccagagagccaaatctatgaagtttaaggatgggtacatgatttcttctgggcaacctgtcaaagattacattgactctgcagtgagacatgtgctcctgagacagggtgtt

SEQ ID NO: 1353 - protein, 181 aa, Glycine max
  misc_feature: Ceres Clone ID no. 1465853
  misc_feature (1)..(181): Bit score of 484.1 for hmm based on sequences of FIGURE 16.
  misc_feature (45)..(102): Pfam Name: KH_2 Pfam Description: KH domain
  misc_feature: Functional Homolog Of SEQ ID NO. 1311
MATQMSKKRKFVADGVFFAELNEVLTRELAEDGYSGVEVRVTPMRTEIIIRATRTQAVLGEKGRRIRELTSVVQKRFKFPENSVELYAEKVNHRGLCAIAQAESLRYKLLGGLAVRMACYGVLRFVMESGAKGCEVIVSGKLRAQRAKSMKFKDGYMISSGQPVKDYIDSAVRHVLLRQGV

SEQ ID NO: 1354 - protein, 238 aa, Solanum tuberosum
  misc_feature: Public GI ID no. 82623397
  misc_feature (1)..(238): Bit score of 480.7 for hmm based on sequences of FIGURE 16.
  misc_feature (46)..(103): Pfam Name: KH_2 Pfam Description: KH domain
  misc_feature: Functional Homolog Of SEQ ID NO. 1311
MATPQISKKRKFVADGVFFAELNEVLTRELAEDGYSGVEVRVTPMRTEIIIRATRTQNVLGEKGRRIRELTSVVQKRFNFKENSVELYAEKVNNRGLCAIAQAESLRYKLLGGLAVRRACYGVLRFVMESGAKGCEVIVSGKLRAQRAKSMKFKDGYMISSGQPVKEYIDAAVRHVLLRQGVLGIKVKIMLDWDPKGKQGPMTPLPDLVTIHPPKEEGEFVVPPPIIAAPAIEVLPVA

SEQ ID NO: 1355 - DNA, 699 bp, Sorghum bicolor
  misc_feature: Ceres Annot ID no. 8656662
  misc_feature: Encodes the peptide sequence at SEQ ID NO. 1356
atggcgtcgactcatgcaatcagcaagaagcggaagttcgtggcggatggcgtgttcttcgcggagctgaatgagatgctcacccgcgagctcgcggaggatggctactccggcgtcgaggtccgcgtcacccccatgcgcaccgagatcatcatccgtgccactcgcacccagaacgtcctcggcgagaagggccggagaatcagggagctgacttctgtggttcagaagcgctttaacttcccggagggtggcgttgaactctacgcagagaaggtgaacaaccgtgggctctgcgccatcgcccaggccgagtcgcttcgctacaagcttctgggtggactagccgtgagaagggcatgttatggtgttctcaggtttgtcatggagagtggcgctaagggctgtgaggttattgtaagtggcaagctcagagcccagcgtgctaagtctatgaagttcaaggatgggtacatgatttcttctggtcatcctgtgaacctatatattgattcagctgtgagacatgttctcttgagacagggtgtgcttggtatcaaggttaagattatgcttgactgggatccaaagggcaagcaagggccaaccatgcctttacctgatctggttacaatccacgagcctaaggaagaggatgagtttttgaggcctcttgcagccgaaatcccagttgcctga

SEQ ID NO: 1356 - protein, 232 aa, Sorghum bicolor
  misc_feature: Ceres Annot ID no. 8656662
  misc_feature (1)..(232): Bit score of 473.6 for hmm based on sequences of FIGURE 16.
  misc_feature (47)..(104): Pfam Name: KH_2 Pfam Description: KH domain
  misc_feature: Functional Homolog Of SEQ ID NO. 1311
MASTHAISKKRKFVADGVFFAELNEMLTRELAEDGYSGVEVRVTPMRTEIIIRATRTQNVLGEKGRRIRELTSVVQKRFNFPEGGVELYAEKVNNRGLCAIAQAESLRYKLLGGLAVRRACYGVLRFVMESGAKGCEVIVSGKLRAQRAKSMKFKDGYMISSGHPVNLYIDSAVRHVLLRQGVLGIKVKIMLDWDPKGKQGPTMPLPDLVTIHEPKEEDEFLRPLAAEIPVA

SEQ ID NO: 1357 - DNA, 609 bp, Triticum aestivum
  misc_feature: Ceres Clone ID no. 1417803
  misc_feature: Encodes the peptide sequence at SEQ ID NO. 1358
atccaaacctagggtttaccttctgccgccgccgccaaatcatctccctccccctcccttctccaacatggctcttcagatcagcaagaagcgaaagttcgtcgccgacggcgtgtttctggccgagctgaacgagatgctgacccgcgagctcggggaggacggcttcgccggcgtcgagatccgggtcacccccatgcgcaccgagatcatcatccgcgccacccgcactcagaacgtcctcggcgagaagggccggaggataagggagctgacgtcggtggtgcagaagcgcttcaactttccggacggcggcgtcgagctgtacgccgagaaggtcctgaaccgcggcctctgcgccgtcgctcaggccgagtccctccgctacaagctgctcggtggcctcgccgtccgaagagcgtgctatggtgtactccgatttgtcatggagagtggtgcgaagggctgcgaggttattgtgagtgggaagcttagggcacagcgtgctaagtccatgaagttcaaggatggctatatgatctcttctggccatcctgtcaacagtatattgatggagctgtgaggcatgttcttctgagacagggtgtg

SEQ ID NO: 1358 - protein, 171 aa, Triticum aestivum
  misc_feature: Ceres Clone ID no. 1417803
  misc_feature (1)..(171): Bit score of 466.5 for hmm based on sequences of FIGURE 16.
  misc_feature (45)..(102): Pfam Name: KH_2 Pfam Description: KH domain
  misc_feature: Functional Homolog Of SEQ ID NO. 1311
MALQISKKRKFVADGVFLAELNEMLTRELGEDGFAGVEIRVTPMRTEIIIRATRTQNVLGEKGRRIRELTSVVQKRFNFPDGGVELYAEKVLNRGLCAVAQAESLRYKLLGGLAVRRACYGVLRFVMESGAKGCEVIVSGKLRAQRAKSMKFKDGYMISSGHPVNSILMEL

SEQ ID NO: 1359 - DNA, 516 bp, Triticum aestivum
  misc_feature: Ceres Clone ID no. 753982
  misc_feature: Encodes the peptide sequence at SEQ ID NO. 1360
atccaaacctagggtttaccttctgccgccgccgccaaatcatctccctccccctcccttctccaacatggctcttcagatcagcaagaagcgaaagttcgtcgccgacggcgtgtttctggccgagctgaacgagatgctgacccgcgagctcggggaggacggcttcgccggcgtcgagatccgggtcacccccatgcgcaccgagatcatcatccgcgccacccgcactcagaacgtcctcggcgagaagggccggaggataagggagctgacgtcggtggtgcagaagcgcttcaactttccggacggcggcgtcgagctgtacgccgagaaggtcctgaaccgcggcctctgcgccgtcgctcaggccgagtccctccgctacaagctgctcggtggcctcgccgtccgaagagcgtgctatggtgtactccgatttgtcatggagagtggtgcgaagggctgcgaggttatygtgagtgggaagcttagggcacagcgtgctaagtccat

SEQ ID NO: 1360 - protein, 149 aa, Triticum aestivum
  misc_feature: Ceres Clone ID no. 753982
  misc_feature (1)..(149): Bit score of 385.8 for hmm based on sequences of FIGURE 16.
  misc_feature (45)..(102): Pfam Name: KH_2 Pfam Description: KH domain
  misc_feature: Functional Homolog Of SEQ ID NO. 1311
  misc_feature (137)..(137): Xaa is any aa, unknown, or other
MALQISKKRKFVADGVFLAELNEMLTRELGEDGFAGVEIRVTPMRTEIIIRATRTQNVLGEKGRRIRELTSVVQKRFNFPDGGVELYAEKVLNRGLCAVAQAESLRYKLLGGLAVRRACYGVLRFVMESGAKGCEVXVSGKLRAQRAKS

SEQ ID NO: 1361 - protein, 231 aa, Ostreococcus lucimarinus CCE9901
  misc_feature: Public GI ID no. 145345927
  misc_feature (1)..(231): Bit score of 414.3 for hmm based on sequences of FIGURE 16.
  misc_feature (46)..(103): Pfam Name: KH_2 Pfam Description: KH domain
  misc_feature: Functional Homolog Of SEQ ID NO. 1311
MVATAISKKRKFVADGVFFAELNEMLVRELAEDGYSGVEVRQTPMRTEIIIRATRTANVLGEKGRRIRELTTLVQRRFQMAEGSVELYAERVNNRGLCAIAQCESLRYKLLGGLAVRRACYGVLRYIMEAGAKGAEVVVSGKLRGQRAKAMKFKDGYMISSGNPVREYIVSCTRHALLRQGTIGMRVKIMLDHDPKGRNGPSTPIPDTVVIHTPKDDEDMAKPYVGKEMEM

SEQ ID NO: 1362 - DNA, 985 bp, Arabidopsis thaliana
  misc_feature: Ceres Seedline no. ME04246
  misc_feature: Encodes the peptide sequence at SEQ ID NO. 1311
taacgcactctcttctccgaatctagggtttttgtctctagcctcctcaagctttgcaaacaatcatggcgacccagatcagcaagaagagaaagttcgtagccgatggtgtgttttacgctgaactcaatgaggttctaaccagagagcttgctgaggatggttactctggtgttgaggttcgcgtcactcctatgcgtactgagatcatcattagagccactcgtactcaaaacgttctcggtgagaagggaaggaggattagggaattgacatctcttgtacaaaagagattcaaatttcctcaggacagtgttgagctttatgctgagaaggttgctaacagaggtctttgtgctattgctcaggctgagtctcttcgttacaagcttcttggtggtcttgctgttcgtagggcgtgctatggtgttttaaggtttgttatggagagtggagctaaaggatgcgaagtcattgtgagtggaaaactccgtgctgcacgtgctaagtagatgaagttcaaggatggttacatggtttcctcaggtcagccaaccaaggaatacattgatgctgcagttaggcatgttcttcttagacagggtgtgcttggtctcaaggtgaagatcatgcttgactgggaccccaagggcaaacaaggaccgatgacaccattgcctgatgttgtgatcatccatacaccgaaagaagatgatgtatacattgcacctgctcaggttgttactcaagctgcttttgtaccggaagctccattaaccaccacagattatccagcaatgccagttgcttagagagccttttcgttttctggtttaaaacccaatggggatggttctttttttgggacagtactagttttctcatgttattctaagttaatacttaaagttctggaggttgaattacatcaaggatatgaatgtatgtttttcgttatcttttgtttaaattttatttatctatt
